(19) United States
(12) Patent Application Publication
(10) Pub. No.: US 2003/0186281 A1
(43) Pub. Date: Oct. 2, 2003

(54) Modified tetracycline repressor protein compositions and methods of use

(76) Inventor: Wolfgang Hillen, Uttenreuth (DE)

Correspondence Address: PENNIE AND EDMONDS, 1155 AVENUE OF THE AMERICAS, NEW YORK, NY, 100362711

(21) Appl. No.: 10/326,671

(22) Filed: Dec. 20, 2002

Related U.S. Application Data
(60) Provisional application No. 60/343,278, filed on Dec. 21, 2001.

(51) Int. Cl. C12Q 1/68; G01N 33/554; G01N 33/569; C07H 21/04; C12N 9/06; C12N 1/21; C12P 21/02; C12N 15/74

(52) U.S. Cl. 435/6; 435/7.32; 435/69.1; 435/252.3; 435/252.31; 435/320.1; 536/23.2; 435/191

(57) ABSTRACT

The present invention relates to a system for regulating gene expression in prokaryotes using modified tetracycline repressor proteins. In particular, the present invention relates to modified tetracycline repressor proteins that exhibit a “reverse” phenotype in prokaryotic organisms, nucleic acids encoding these repressor proteins, methods for identifying and preparing these proteins, and methods for using these proteins for regulating gene expression in prokaryotic organisms, in drug screening assays and for identifying non-antibiotic compounds that are specific inducers of these modified repressor proteins.

[0001] This application claims the benefit of priority of U.S. provisional application serial No. 60/343,278, filed Dec. 21, 2001, which is incorporated herein by reference, in its entirety.

### 1. INTRODUCTION

[0002] The present invention relates to a system for regulating gene expression in prokaryotes using modified tetracycline repressor proteins. In particular, the present invention relates to modified tetracycline repressor proteins that exhibit a “reverse” phenotype in prokaryotic organisms, nucleic acids encoding these repressor proteins, methods for identifying and preparing these proteins, and methods for using these proteins for regulating gene expression in prokaryotic organisms, in drug screening assays and for identifying non-antibiotic compounds that are specific inducers of these modified repressor proteins.

### 2. BACKGROUND OF THE INVENTION

[0003] Increased resistance of pathogenic organisms to conventional antibiotics is a serious clinical problem confronting physicians and health care providers. Resistance to tetracycline (tet), a broad spectrum antibiotic that inhibits bacterial protein chain elongation, is one of the most common forms of antibiotic resistance encountered in bacteria, and at least three mechanisms have been described for conferring resistance: active efflux of tetracycline from the cell, protection of the ribosomal protein target and chemical degradation of the drug (for a general review of tetracycline resistance, see Hillen & Berens, (1994) Annu. Rev. Microbiol. 48:345-369).

[0004] The most abundant resistance mechanism against tetracycline in Gram-negative bacteria is active efflux of tetracycline from the cell, and resistance is often conferred to cells by tetracycline-resistance determinants that are encoded by mobile genetic elements. Certain mobile genetic elements, e.g., the transposon Tn10, contain two genes involved in resistance: a resistance gene, tetA, and a regulatory gene, tetR, which are transcribed from divergent promoters that are regulated by tetracycline. The resistance protein, TetA, is a tetracycline/metal-proton antiporter located in the cytoplasmic membrane and is responsible for efflux of tetracycline from the cell. The repressor protein, TetR, is a dimeric, DNA binding protein that regulates the expression of tetA and tetR at the level of transcription by binding in the absence of tetracycline to specific nucleotide sequences located within and overlapping the divergent promoter region (i.e., tandem tet operators O1 and O2; e.g., see Wissmann et al., (1991) Genetics 128:225-232). In the presence of tetracycline, TetR binds to intracellular tetracycline, which has a higher affinity for TetR than its target in the host. The binding of tetracycline results in an allosteric conformational change that greatly reduces the affinity of TetR for DNA thereby leaving the divergent promoters available for access by RNA polymerase, whereupon transcription of tetA and tetR is induced. Once tetracycline has been removed, the original conformation of TetR predominates and transcription of each promoter is repressed.

[0005] A number of different classes of Tet repressors and cognate operator sequences have been described, e.g., TetR(A), TetR(B), TetR(C), TetR(D), TetR(E), TetR(G), TetR(H), TetR(J), and TetR(Z). Individual Tet repressors are assigned to one of the above classes based upon nucleic acid hybridization, under stringent conditions, of the DNA encoding the associated efflux pump to that of the prototype for each class. In general, Tet repressors within each class exhibit at least 80% sequence identity (M. C. Roberts, 1996 FEMS. Microbiol. Reviews 19: 1-24), while the amino acid sequences between members of different classes of Tet repressors share a relatively high degree of homology (i.e., 40-60% across the length of the protein). In addition, Tet repressors have been subjected to extensive genetic and biochemical characterization, and a number of TetR variants haver been described, including modified tetracycline repressor fusion proteins that bind to tet operator DNA in eukaryotic cells only in the presence of tet (Gossen et al., (1995) Science 268:1766-1769). In the latter instance, these modified repressor proteins are used as fusion proteins containing an additional transactivator domain such that binding of the fusion protein via the DNA binding domain of TetR to a tet operator sequence engineered into a eukaryotic promoter results in transcriptional activation, not repression as described above for prokaryotic organisms. The presence of the additional transactivator domain as well as the dramatically different cellular environment between prokaryotic and eukaryotic organisms makes such fusion proteins undesirable for prokaryotic systems.

[0006] Notwithstanding the extensive amount of biochemical and genetic manipulation of tetracycline repressors over two decades, modified tetracycline repressors that exhibit a reverse phenotype in prokaryotic organisms (revTetR) have not yet been identified. Thus, there is a need to identify revTetR that are active in prokaryotic organisms, and that can provide a system for regulating gene expression in prokaryotic organisms.

### 3. SUMMARY OF THE INVENTION

[0007] A regulatory system that utilizes modified components of the Tet repressor/operator system to regulate gene expression in prokaryotic cells is provided. In particular, modified tetracycline repressor proteins that exhibit a “reverse” phenotype in prokaryotes, nucleic acids encoding these proteins, methods for identifying and preparing these proteins, and methods of use therefor in regulating gene expression in prokaryotic organisms, in drug screening assays, and in the identification of non-antibiotic molecules that are specific inducers of the instant revTetR repressors are provided.

[0008] In one embodiment, modified tetracycline repressor polypeptides that exhibit a “reverse” phenotype (revTetR) in prokaryotic organisms are provided. The revTetR repressors of the present invention bind to a tet operator DNA sequence in prokaryotes with a greater affinity (i.e., with a lower dissociation constant or K_{d} value) in the presence of tetracycline or tetracycline analog than in the absence of tetracycline or tetracycline analog. In one aspect, revTetR that exhibit the reverse phenotype in prokaryotes only at defined temperatures, e.g., at 28° C. or at 37° C., are provided.

[0009] In certain embodiments, the isolated nucleic acids comprise a nucleotide sequence encoding modified revTetR proteins that exhibit the reverse phenotype in prokaryotes only at particular “permissive” temperatures, e.g., at 28° C., while exhibiting essentially undetectable binding to a tet operator sequence at other “non-permissive” temperatures, e.g. 37° C. In still further embodiments, the isolated nucleic acids comprise a nucleotide sequence encoding modified revTetR proteins that exhibit the reverse phenotype in prokaryotes only at particular “permissive” temperatures, e.g., at 37° C., while exhibiting essentially undetectable binding to a tet operator sequence at other “non-permissive” temperatures, e.g. 28° C. In such embodiments, transcription in a prokaryote from a promoter operably associated with a tet operator is at least ten-fold greater at the permissive temperature than it is at the non-permissive temperature. In other such embodiments, transcription in a prokaryote from a promoter operably associated with a tet operator is at least twenty-fold or at least forty-fold greater at the permissive temperature than it is at the non-permissive temperature.

[0010] In one preferred embodiment, the modified tetracycline repressor is a chimeric revTetR that comprises the DNA binding domain of TetR(B) (e.g., amino acid residues 1-50 of SEQ ID NO. 32) and the tetracycline binding pocket of TetR(D), (e.g., amino acid residues 51-208 of SEQ ID NO. 32), i.e., a TetR(BD), and further comprises at least one amino acid substitution at position 96 or 99, or substitutions at positions 96, 103 and 114; positions 96, 157 and 200; positions 96 and 159; positions 160, 178, 196; positions 59, 95 and 100; positions 96 and 188; positions 96 and 205; positions 96 and 110; positions 99 and 194; positions 99 and 158; positions 70, 91 and 99; positions 71, 95 and 127; positions 59, 98, 101 and 192, of SEQ ID NO: 32.

[0011] Presently preferred amino acid substitutions that confer a reverse phenotype in prokaryotes include, but are not limited to, Asn at position 59, Val at positions 70 and 71; Gln at position 91; Glu and Gly at position 95; Arg and Glu at position 96; Arg at position 98; Glu at position 99; Ala at position 100; His at position 101; Ser at position 103; Phe at position 110; Val at position 114; Arg at position 127; Asn at position 157; Cys at position 158; Leu at position 159; Gln at position 188; Gly at position 192; Val at position 194; Trp at position 196; His at position 200; and Ser at position 205 of SEQ ID NO: 32. In more preferred embodiments, the revTetR comprises an amino acid sequence selected from any of one of the sequences set forth in SEQ ID NOS. 2, 4, 6, 8, 10, 12, 14, 16, 18, 20, 22, 24, 26, 28, and 30.

[0012] Additional examples of amino acid substitutions within the amino acid sequence of SEQ ID NO: 32 that confer a reverse phenotype on the encoded tetracycline repressor protein are provided. Accordingly, revTetR proteins of the present invention also include those comprising an amino acid sequence selected from the group consisting of SEQ ID NOS.: 71 to 264. The nucleotide sequences comprising the preferred nucleotide substitutions in these examples are provided in SEQ ID NOS.: 265 to 458.

[0013] In still another embodiment, revTetR comprising at least 6, 8, 10, 15, 18, 20, 25, 30, 35, 40, 45, 50 contiguous amino acids or more that contain at least one amino acid substitution that confers a reverse phenotype in prokaryotes are provided. Presently preferred peptides are those comprising at least one mutation conferring a reverse phenotype located within all or a portion of amino acid positions 90 to 105, 95 to 103; 110 to 127; 150 to 159; and 160 to 205 of SEQ ID NO: 32. Additional preferred peptides containing one or more amino acid substitutions that confer a reverse phenotype in prokaryotes include those made in a segment spanning amino acid positions 13-25, 14-24, and 17-23. In specific aspects of this embodiment, the revTetR protein comprises an amino acid substitution at a position selected from the group consisting of positions number 18, 22, 20, 23, and 17 of SEQ ID NO: 32, selected from the group consisting of positions 18, 20, and 22 of SEQ ID NO: 32, and more particularly, or at position 18 of SEQ ID NO: 32. Other preferred peptides comprising one or more amino acid substitutions that confer a reverse phenotype in prokaryotes include those made in a segment spanning amino acid positions 53-61 of SEQ ID NO: 32. In specific aspects of this embodiment, the revTetR protein comprises an amino acid substitution at a position selected from the group consisting of positions 59, 56, 53, 61, and 60 of SEQ ID NO: 32, and more particularly, selected from the group consisting of positions 59 and 56 of SEQ ID NO.; 32. Other preferred peptides comprisng one or more amino acid substitutions those made in a segmentt confer a reverse phenotype in prokaryotes include that spanning amino acid positions 95-99 of SEQ ID NO: 32. In a specific aspect of this embodiment, the revTetR comprises an amino acid substitution at a position selected from the group consisting of position 99 and 96 of SEQ ID NO: 32.

[0014] In other embodiments of the present invention, the specific amino acid substitutions identified as described herein with TetR(BD) chimeras, may also, in turn, be substituted by similar, functionally equivalent amino acids, as described infra, to provide additional revTetR repressors that are within the scope of the invention. Moreover, in certain embodiments, a revTetR repressor protein of the present invention can be constructed from any TetR repressor protein, in particular, the TetR protein of of the TetR(A), TetR(B), TetR(C), TetR(D), TetR(E), TetR(G), TetR(H), TetR(J), and TetR(Z) classes, by substituting, at the position corresponding to that identified in the TetR(BD) chimera depicted in SEQ ID NO: 32, either the exact amino acid identified in the revTet(BD) chimeras depicted in SEQ ID NO: 2, 4, 6, 8, 10, 12, 14, 16, 18, 20, 22, 24, 26, 28, 30, and 71-264, or the functional equivalent of that amino acid.

[0015] The amino acid substitutions of the present invention and their functional equivalents can be introduced into TetR proteins of each of the nine classes of TetR proteins, to provide novel revTet repressor proteins. The position of each of the amino acid substitutions disclosed above is numbered according to the amino acid sequence of the TetR(BD) chimeric protein of SEQ ID NO: 32. As would be apparent to one of ordinary skill, the corresponding amino acid to be substituted in another TetR protein such as, but not limited to those;members of the TetR(A), TetR(B), TetR(C), TetR(D), TetR(E), TetR(G), TetR(H), TetR(J), and TetR(Z) classes of TetR repressor proteins to provide a revTetR protein, is readily identified using methods and tools well known in the art. For example, the amino acid sequence of a subject TetR repressor is readily compared with that provided by SEQ ID NO: 32 using software publically available from the National Center for Biotechnology Information and the National Library of Medicine at http://www.ncbi.nlm.nih.gov/BLAST. (For a description of this software, see Tatusova et al. (1999) FEMS Microbiol Lett 177(1): 187-88).

[0016] For example, comparisons have been carried out for each representative TetR(A), TetR(B), TetR(C), TetR(D), TetR(E), TetR(G), TetR(H), TetR(J), and TetR(Z) protein disclosed above, to provide the position and nature of the amino acid corresponding to each of the substitutions disclosed herein, for each representative class member. The results of such comparisons are summarized in Table 1, where TetR(BD) is SEQ ID NO: 32, TetR(A) is SEQ ID NO: 34, TetR(B) is SEQ ID NO: 36, TetR(C) is SEQ ID NO: 38, TetR(D) is SEQ ID NO: 40, TetR(E) is SEQ ID NO: 42, TetR(G) is SEQ ID NO: 44, TetR(H) is SEQ ID NO: 46, TetR(J) is SEQ ID NO: 48, and TetR(Z) is SEQ ID NO: 50. The first column of Table 1 provides the wild type amino acid residue, the amino acid position number, and the substituted amino acid residue found at that position in the revTet(BD) mutants disclosed above. The corresponding amino acid position and wild type amino acid residue found at that position for each representative member of TetR A, B, C, D, E, G, H, J, and Z are provided in the remaining nine columns of Table 1.

[0017] In another aspect of the invention, isolated nucleic acids comprising nucleotide sequences encoding modified tetracycline repressor proteins that exhibit a “reverse” phenotype (revTetR) in prokaryotic cells are provided. In one embodiment, the isolated nucleic acids comprise a nucleotide sequence encoding modified revTetR proteins that bind to a tet operator DNA sequence in prokaryotes with a greater affinity (i.e., with a lower dissociation constant or K_{d} value) in the presence of tetracycline or tetracycline analog than in the absence of tetracycline or tetracycline analog. In other embodiments, the isolated nucleic acids comprise a nucleotide sequence encoding modified revTetR proteins that exhibit the reverse phenotype in prokaryotes only at particular temperatures, e.g., exhibit the reverse phenotype only at 28° C. or 37° C., but not both.

[0018] In preferred embodiments, the isolated nucleic acid molecules encode a chimeric revTetR repressor composed of the DNA binding domain of TetR(B) (e.g., amino acid residues 1-50 of SEQ ID NO. 32) and the tetracycline binding pocket of TetR(D), (e.g., amino acid residues 51-208 of SEQ ID NO. 32) and further comprises at least one mutation conferring a reverse phenotype in a prokaryotic organism.

[0019] In other embodiments, the isolated nucleic acids comprise a nucleotide sequence that encodes any of the amino acid sequences set forth in SEQ ID NOS. 2, 4, 6, 8, 10, 12, 14, 16, 18, 20, 22, 24, 26, 28, 30, and 71-264. In further embodiments, the isolated nucleic acids comprise the sequence of nucleotides selected from the group consisting of SEQ ID NOS. 1, 3, 5, 7, 9, 11, 13, 15, 17, 19, 21, 23, 25, 27, 29, and 265-458.

[0020] In still further embodiments, the isolated nucleic acid molecules encode a revTetR comprising a sequence of nucleotides including at least one revTetR mutation, and preferably having at least 35%, 40%, 50%, 60%, 70%, 75%, 80%, 85%, 90%, 95%, 98% or 99% nucleotide sequence identity, more preferably at least 90%, 95%, 98% or 99% sequence identity, to any of the nucleotide sequences set forth in SEQ ID NOS. 1, 3, 5, 7, 9, 11, 13, 15, 17, 19, 21, 23, 25, 27, 29, and 265-458.

[0021] In yet another embodiment, the isolated nucleic acid molecules comprise a sequence of nucleotides which comprises at least one revTetR mutation and hybridizes under moderate stringency conditions to the entire length of any of the nucleotide sequences set forth in SEQ ID NOS. 1, 3, 5, 7, 9, 11, 13, 15, 17, 19, 21, 23, 25, 27, 29, and 265-458. In still yet another embodiment, the isolated nucleic acid molecules comprise a sequence of nucleotides which comprises one or more revTetR mutation(s), and hybridizes under high stringency conditions to the entire length of any of the nucleotide sequences set forth in SEQ ID NOS. 1, 3, 5, 7, 9, 11, 13, 15, 17, 19, 21, 23, 25, 27, 29, and 265-458.

[0022] Isolated nucleic acids comprising a full-length complement of the nucleotide sequences any of these nucleic acids are also provided.

[0023] Isolated nucleic acid fragments of a revTetR comprising at least 10, 15, 20, 25, 30, 35, 40, 45 or 50 contiguous nucleotides comprising at least one mutation that confers a reverse phenotype in prokaryotes, or the complement thereof, are also provided. Particularly preferred nucleic acid fragments are those containing at least one mutation conferring a reverse phenotype in prokaryotic organisms located within nucleotide positions 210-216, 285 to 309, 330-381, 450-477, or 480 to 605 of SEQ ID NO. 31. Additional preferred nucleic acid fragments are those containing at least one mutation conferring a reverse phenotype in prokaryotic organisms within nucleotide positions 37-75, 40-72, 49-69, 157-183, and 283-297 of SEQ ID NO: 31.

[0024] In other embodiments, isolated nucleic acids comprising the coding region of a revTetR of the present invention operably linked to a nucleotide sequence containing a heterologous promoter are provided. In further embodiments, a vector or plasmid comprising nucleotide sequences encoding a revTetR of the present invention are provided.

[0025] In other embodiments, prokaryotic organisms comprising the isolated nucleic acids encoding a revTetR of the present invention are provided. Presently preferred prokaryotic organisms include, but are not limited to Bacillus anthracis, Bacteriodes fragilis, Bordetella pertussis, Burkholderia cepacia, Camplyobacter jejuni, Chlamydia pneumoniae, Chlamydia trachomatus, Clostridium botulinum, Clostridum tetani, Clostridium perfringens, Clostridium difficile, Corynebacterium diptheriae, Enterobacter cloacae, Enterococcus faecalis, Escherichia coli, Haemophilus influenzae, Helicobacter pylori, Klebsiella pneumoniae, Listeria monocytogenes, Moraxella catarrhalis, Mycobacterium leprae, Mycobacterium tuberculosis, Neisseria gonorrhoeae, Nesseria meningitidis, Nocardia asteroides, Proteus vulgaris, Pseudomonas aeruginosa, Salmonella typhi, Salmonella typhimurium, Shigella boydii, Shigella dysenteriae, Shigella flexneri, Shigella sonnei, Staphylococcus aureus, Staphylococcus epidermidis, Streptococcus mutans, Streptococcus pneumoniae, Treptonema pallidum, Vibrio cholerae, Vibrio parahemolyticus, and Yersina pestis.

[0026] In yet another embodiment, antibodies to modified tetracycline repressor that specifically recognize a revTetR, but not wild type TetR, are provided. The antibodies may be polyclonal or monoclonal antibodies, and are more preferably monoclonal antibodies that are specific for the conformation of the resulting revTetR or specific against the epitopes comprising the substitutions that confer the reverse phenotype. Preferred antibodies of the present invention have binding affinities including those with a dissociation constant or K_{d} less than 5×10⁻⁶M, 10⁻⁶M, 5×10⁻⁷M, 10⁻⁷M, 5×10⁻⁸M, 10⁻⁸M, 5×10 ⁻⁹M, 10⁻⁹M, 5×10⁻¹⁰M, 10⁻¹⁰M, 5×10⁻¹¹M, 10⁻¹¹M, 5×10⁻¹²M, 10⁻¹²M, 5×10⁻¹³M, 10⁻¹³M, 5×10⁻¹⁴M, 10⁻¹⁴M, 5×10⁻¹⁵M, or 10⁻¹⁵M.

[0027] In another embodiment, methods for preparing recombinant, modified tetracycline repressors that exhibit a reverse phenotype in prokaryotes are provided. In one aspect, the method comprises introducing into a prokaryotic organism an expressible nucleic acid comprising a nucleotide sequence encoding a modified tetracycline repressor that exhibits a reverse phenotype in the prokaryotic organism, expressing the modified tetracycline repressor protein in the organism, and purifying the expressed modified tetracycline repressor. In a preferred embodiment, the nucleotide sequence encoding the modified tetracycline repressor is selected from nucleotide sequence encoding any of the amino acid sequences of SEQ ID NOS. 2, 4, 6, 8, 10, 12, 14, 16, 18, 20, 22, 24, 26, 28, 30, and 71-264.

[0028] In another embodiment, methods for identifying modified tetracycline repressors that exhibit a reverse phenotype in prokaryotes are provided. The methods comprise introducing into prokaryotic organisms a collection of nucleic acids each comprising a reporter gene operatively linked to a promoter regulated by a tetracycline operator, and an expressible nucleic acid encoding a modified tetracycline repressor containing at least one, preferably different, amino acid substitutions relative to a wild type tetracycline repressor that binds the tetracycline operator in the absence of tetracycline or tetracycline analog; culturing the prokaryotic organism in the presence or absence of tetracycline or tetracycline analog, and under conditions such that the modified tetracycline repressor is expressed; comparing and identifying the prokaryotic organism that express the reporter gene at a higher level in the absence than in the presence of the tetracycline or tetracycline analog.

[0029] The modified tetracycline-regulated repressor proteins of the present invention are useful for regulating expression, in a highly controlled manner, of a gene linked to one or more tet operator sequences in prokaryotes. Methods for using the regulatory system for regulating expression of a tet operator-linked gene in a prokaryotic organism are provided. In one embodiment, the method comprises introducing into an organism a target gene of interest which is under the control of at least one tet operator and an expressible nucleotide sequence encoding a revTetR, and contacting the organism with a concentration of tetracycline or tetracycline analog sufficient to alter the level of transcription of the target gene. The methods of the invention also allow for the regulation of expression of an endogenous gene which has been operatively linked to one or more tet operator sequence(s) that binds the revTet of the invention. In a preferred embodiment, the nucleotide sequence encoding the revTetR repressor is selected from nucleotide sequence encoding any of the amino acid sequences of SEQ ID NOS. 2, 4, 6, 8, 10, 12, 14, 16, 18, 20, 22, 24, 26, 28, 30, and 71-264. Alternatively, the tet operator-linked gene can be an exogenous gene which has been introduced into the cells.

[0030] In another embodiment, methods for identifying genes or gene products essential for proliferation or pathogenicity of a prokaryotic organism are provided. In one embodiment, the method comprises introducing into the prokaryotic organism an expressible nucleic acid encoding a putatively essential gene for proliferation or pathogenicity under the control of a promoter and at least one tet operator, and an expression vector comprising a nucleotide sequence encoding a modified tetracycline repressor, wherein said modified tetracycline repressor binds to a tetracycline operator sequence in a prokaryotic organism with a greater affinity in the presence of tetracycline or a tetracycline analog than in the absence of tetracycline or a tetracycline analog. The prokaryotic organism is cultured under conditions such that the modified tetracycline repressor is expressed, and in the presence of tetracycline or tetracycline analog at a concentration sufficient to repress expression of the putative essential gene. In a preferred aspect of this embodiment, the concentration of tetracycline or tetracycline analog sufficient to repress expression of the putative essential gene is a sub-inhibitory concentration. The viability or pathogenicity of the prokaryotic organism is determined, whereby a lack or decrease in viability or pathogenicity in the presence of the antibiotic indicate that the gene is essential or required for pathogenesis.

[0031] In yet another embodiment, methods for identifying compounds that inhibit an essential gene or gene product are provided. The method comprises introducing into the prokaryotic organism a nucleic acid comprising a nucleotide sequence encoding an essential gene under the control of at least one tet operator, and an expressible nucleic acid encoding a modified tetracycline repressor, wherein said modified tetracycline repressor binds to a tetracycline operator sequence in the prokaryotic organism with a greater affinity in the presence of tetracycline or a tetracycline analog than in the absence of tetracycline or a tetracycline analog; culturing the prokaryotic organism under conditions such that the modified tetracycline repressor is expressed and in the presence of tetracycline or tetracycline analog at a concentration sufficient to repress expression of the essential gene; contacting the prokaryotic organism with a test compound; and determining the effect of the test compound compared to control cell not cultured in tetracycline or tetracycline analog. In a further aspect of this embodiment, the control cell comprises an expressible nucleic acid encoding the modified tetracycline repressor and is cultured in the presence of the tetracycline or tetracyline analog, but the essential gene of the control cell is not under the control of a tet operator.

[0032] In yet another embodiment, methods for identifying non-antibiotic compounds that mimic tetracycline or its analog and can modulate the binding affinity of the modified tetracycline repressor to a tetracycline operator, are provided. Preferably, the non-antibiotic compounds specifically interact with revTetR to produce the reverse phenotype in prokaryotes. The method comprises introducing into the prokaryotic organism a nucleic acid comprising a reporter gene operatively linked to a promoter regulated by a tetracycline operator, and an expression vector comprising a nucleotide sequence encoding the modified tetracycline repressor; culturing the prokaryotic organism in the presence or absence of the non-antibiotic compound, and under conditions such that the modified tetracycline repressor is expressed; and identifying the non-antibiotic compound that modulates expression of the reporter gene product.

[0033] In a further embodiment, methods for in vivo antibiotic screening are provided. In this embodiment, a prokaryotic organism comprising a target gene essential for proliferation or pathogenicity is placed under the control of a promoter and at least one tet operator, and an expressible nucleotide sequence encoding a revTetR. Hence, expression of the revTetR gene in the recombinant prokaryotic organism regulates the level of expression of the target gene product required for growth and/or pathogenicity. Such a recombinant organism is used to infect a suitable animal model of a disease caused by the prokaryotic organism, e.g. a mouse model of an infectious disease, and the level of expression of the essential and/or virulence gene or genes is modulated by the level of tetracycline or its analog provided to the test mouse, e.g., in its drinking water. The beneficial effect(s) of the test compound on the infected animal is compared with control animals not provided with the antibiotic. In this manner, the virulence and/or growth rate of the pathogen may be regulated, providing a test system of variable sensitivity in an animal model. The sensitivity of the system can be adjusted by the amount of tetracycline in the system. That is, minimal expression of the regulated target gene product will provide a system capable of detecting low levels of active compound, as well as, higher levels of less-active compound that may serve as a lead structure for further development. Alternatively, high level expression of the regulated gene provides a less sensitive system in which only the most active compounds will be detected.

### 4. BRIEF DESCRIPTION OF THE DRAWINGS

[0034] FIG. 1: FIG. 1 illustrates the alignment of the primary amino acid sequences of the following TetR repressor proteins: TetR(A) (SEQ ID NO: 34); TetR(B) (SEQ ID NO: 36); TetR(C) (SEQ ID NO: 38); TetR(D) (SEQ ID NO: 40); TetR(E) (SEQ ID NO: 42); TetR(G) (SEQ ID NO: 70), which represents a combination of three Genbank Accession Files: AF133139, AF133140, and S52438; TetR(H) (SEQ ID NO: 46); TetR(30) (SEQ ID NO: 69); and TetR(Z) (SEQ ID NO: 50).

[0035] FIG. 2: FIG. 2 shows the relative activity of the modified TetR repressors that exhibit a reverse phenotype in prokaryotes. The relative activity of revTetR repressors was determined at 28° C. and 37° C. for each clone by measuring β-galactosidase activity of a tetracycline-regulated promoter in transformed Escherichia coli in the presence and absence of the tetracycline analog, anhydrotetracycline (atc). The relative β-galactosidase activity was measured in standard Miller units and is presented as the percent of maximal expression as measured in the absence of Tet repressor. The absolute levels of repressed and non-repressed transcription vary but each mutant demonstrates the reverse phenotype compared to wild type. With respect to each mutant, as well as the wild-type controls, FIG. 2 provides two horizontal bars; the upper horizontal bar represents the level of β-galactosidase activity in the absence of anhydrotetracycline (−atc) while the lower horizontal bar represents the level of β-galactosidase activity in the presence of anhydrotetracycline (+atc).

[0036] FIG. 3: FIG. 3 illustrates the time-dependent induction of tet-regulated transcription by revTetR repressors upon removal of the tetracycline analog, anhydrotetracycline (atc).

### 5. DETAILED DESCRIPTION OF THE INVENTION

[0037] 5.1. Definitions

[0038] Unless defined otherwise, all technical and scientific terms used herein have the same meaning as is commonly understood by one of skill in the art to which this invention belongs. All patents and publications referred to herein are, unless noted otherwise, incorporated by reference in their entirety.

[0039] As used herein, “nucleotide sequence” refers to a heteropolymer of nucleotides, including but not limited to ribonucleotides and deoxyribonucleotides, or the sequence of these nucleotides. “Nucleic acid” and “polynucleotide” are also used interchangeably herein to refer to a heteropolymer of nucleotides, which may be unmodified or modified DNA or RNA. For example, polynucleotides can be single-stranded or double-stranded DNA, DNA that is a mixture of single-stranded and double-stranded regions, hybrid molecules comprising DNA and RNA with a mixture of single-stranded and double-stranded regions. In addition, the polynucleotide can be composed of triple-stranded regions comprising DNA, RNA, or both. A polynucleotide can also contain one or more modified bases, or DNA or RNA backbones modified for nuclease resistance or other reasons. Generally, nucleic acid segments provided by this invention can be assembled from fragments of the genome and short oligonucleotides, or from a series of oligonucleotides, or from individual nucleotides, to provide a synthetic nucleic acid.

[0040] As used herein, a “probe”, “primer”, or “fragment” is single-stranded DNA or RNA that has a sequence of nucleotides that includes at least 10 contiguous bases that are the same as (or the complement of) any 14 bases set forth in any of SEQ ID NOS. 1, 3, 5, 7, 9, 11, 13, 15, 17, 19, 21, 23, 25, 27, 29, and 265-458. Preferred regions from which to construct probes and primers include 5′ and/or 3′ coding sequences, sequences predicted to confer the reverse phenotype in prokaryotic organisms. Particularly preferred nucleic acid fragments are those containing at least one mutation conferring a reverse phenotype in prokaryotic organisms in the regions comprising nucleotides 210-216, 285 to 309, 330-381, 450-477, or 480 to 605 of SEQ ID NO. 31. Additional preferred nucleic acid fragments are those containing at least one mutation conferring a reverse phenotype in prokaryotic organisms in the regions comprising nucleotides 37-75, 40-72, 49-69, 157-183, and 283-297.

[0041] As used herein, “polypeptide” refers to the molecule formed by joining amino acids to each other by peptide bonds, and may contain amino acids other than the twenty commonly used gene-encoded amino acids. The term “active polypeptide” refers to those forms of the polypeptide which retain the biologic and/or immunologic activities of any naturally occurring polypeptide. The term “naturally occurring polypeptide” refers to polypeptides produced by cells that have not been genetically engineered and specifically contemplates various polypeptides arising from post-translational modifications of the polypeptide including, but not limited to, proteolytic processing, acetylation, carboxylation, glycosylation, phosphorylation, lipidation and acylation.

[0042] As used herein, “recombinant” refers to a polypeptide or protein, means that is derived from recombinant (e.g., microbial or mammalian) expression systems. “Microbial” refers to recombinant polypeptides or proteins made in bacterial or fungal (e.g., yeast) expression systems. As a product, “recombinant microbial” refers to a polypeptide or protein essentially unaccompanied by associated native glycosylation. Polypeptides or proteins expressed in most bacterial cultures, e.g., E. coli, will be free of glycosylation modifications; polypeptides or proteins expressed in yeast will be glycosylated.

[0043] As used herein, “isolated” refers to a nucleic acid or polypeptide separated from at least one macromolecular component (e.g., nucleic acid or polypeptide) present with the nucleic acid or polypeptide in its natural source. In one embodiment, the polynucleotide or polypeptide is purified such that it constitutes at least 95% by weight, more preferably at least 99.8% by weight, of the indicated biological macromolecules present (but water, buffers, and other small molecules, especially molecules having a molecular weight of less than 1000 daltons, can be present).

[0044] As used herein, “substantially” varies with the context as understood by those skilled in the relevant art and generally means at least 70%, preferably means at least 80%, more preferably at least 90%, and still more preferably 95%, and most preferably at least 98%.

[0045] As used herein, a “sub-inhibitory” concentration of e.g. tetracycline or a tetracycline analog refers to a concentration that does not significantly affect the growth rate of a specific prokaryotic organism. That is, the growth rate of the prokaryotic organism cultured in the presence of a sub-inhibitory concentration of tetracycline or a tetracyline analog is substantially the same as that of the same organism cultured in the absence of tetracycline or the tetracyline analog. A sub-inhibitory level of tetracycline or a tetracycline analog is also referred to herein as a “non-antibiotic” concentration of tetracycline or a tetracycline analog.

[0046] As used herein, “substantial sequence homology” as used in reference to the nucleotide sequence of DNA, the ribonucleotide sequence of RNA, or the amino acid sequence of protein, that have slight and non-consequential sequence variations from the actual sequences disclosed herein. Species having substantial sequence homology are considered to be equivalent to the disclosed sequences and as such are within the scope of the appended claims. In this regard, “slight and non-consequential sequence variations” mean that “homologous” sequences, i.e., sequences that have substantial similarity with the DNA, RNA, or proteins disclosed and claimed herein, are functionally equivalent to the sequences disclosed and claimed herein. Functionally equivalent sequences will function in substantially the same manner to produce substantially the same compositions as the nucleic acid and amino acid compositions disclosed and claimed herein. In particular, functionally equivalent DNAs encode proteins that are the same as those disclosed herein or that have conservative amino acid variations, such as substitution of a non-polar residue for another non-polar residue or a charged residue for a similarly charged residue. These changes include those recognized by those of skill in the art as those that do not substantially alter the tertiary structure of the protein.

[0047] As used herein, “substantially pure” means sufficiently homogeneous to appear free of readily detectable impurities as determined by standard methods of analysis, such as thin layer chromatography (TLC), gel electrophoresis and high performance liquid chromatography (HPLC), used by those of skill in the art to assess such purity, or sufficiently pure such that further purification would not detectably alter the physical and chemical properties, such as enzymatic and biological activities, of the substance. Methods for purification of the compounds to produce substantially chemically pure compounds are known to those of skill in the art. A substantially chemically pure compound may, however, be a mixture of stereoisomers. In such instances, further purification might increase the specific activity of the compound.

[0048] As used herein, “biological activity” refers to the in vivo activities of a compound or physiological responses that result upon administration of a compound, composition or other mixture. Biological activities may be observed in in vitro systems designed to test or use such activities.

[0049] As used herein, “functionally equivalent,” refers to a polypeptide capable of exhibiting a substantially similar in vivo activity as the modified revTetR repressors encoded by one or more of the nucleotide sequences described herein.

[0050] As used herein: stringency of hybridization in determining sequence similarity is as follows:

[0051] 1) high stringency: 0.1× SSPE, 0.1% SDS, 65° C.

[0052] 2) moderate stringency: 0.2× SSPE, 0.1% SDS, 50° C.

[0053] 3) low stringency: 1.0× SSPE, 0.1% SDS, 50° C.

[0054] It is understood that equivalent stringencies may be achieved using alternative buffers, salts and temperatures (e.g., see Maniatis (1989) Molecular Cloning, A Laboratory Manual, Cold Spring Harbor, N.Y.; Current Protocols in Molecular Biology (Ausubel et al., eds) Vol. 1, Chapter 2 (John Wiley & Sons, Inc.)).

[0055] As used herein, “expression” refers to the process by which a nucleic acid is transcribed into mRNA and translated into peptides, polypeptides, or proteins.

[0056] As used herein, “vector” or “plasmid” refers to discrete elements that are used to introduce heterologous DNA into cells for either expression of the heterologous DNA or for replication of the cloned heterologous DNA. Selection and use of such vectors and plasmids are well within the level of skill of the art.

[0057] As used herein, “transformation/transfection” refers to the process by which DNA or RNA is introduced into cells. Transfection refers to the taking up of exogenous nucleic acid, e.g., an expression vector, by a host cell whether any coding sequences are in fact expressed or not. Numerous methods of transfection are known to the ordinarily skilled artisan, for example polyethylene glycol [PEG]-mediated DNA uptake, electroporation, lipofection [see, e.g., Strauss (1996) Meth. Mol. Biol. 54:307-327], microcell fusion [see, Lambert (1991) Proc. Natl. Acad. Sci. U.S.A. 88:5907-5911; U.S. Pat. No. 5,396,767, Sawford et al. (1987) Somatic Cell Mol. Genet. 13:279-284; Dhar et al. (1984) Somatic Cell Mol. Genet. 10:547-559; and McNeill-Killary et al. (1995) Meth. Enzymol. 254:133-152], lipid-mediated carrier systems [see, e.g., Teifel et al. (1995) Biotechniques 19:79-80; Albrecht et al. (1996) Ann. Hematol. 72:73-79; Holmen et al. (1995) In Vitro Cell Dev. Biol. Anim. 31:347-351; Remy et al. (1994) Bioconjug. Chem. 5:647-654; Le Bolch et al. (1995) Tetrahedron Lett. 36:6681-6684; Loeffler et al. (1993) Meth. Enzymol. 217:599-618] or other suitable method. Transformation means introducing DNA into an organism so that the DNA is replicable, either as an extrachromosomal element or by chromosomal integration. Transformation include various processes of DNA transfer that occur between organisms, such as but not limited to conjugation. Successful transformation/transfection is generally recognized by detection of the presence of the heterologous nucleic acid within the transformed/transfected cell, such as any indication of the operation of a vector within the host cell.

[0058] As used herein, “recombinant host cells” refers to cultured cells which have stably integrated a recombinant transcriptional unit into chromosomal DNA or carry stably the recombinant transcriptional unit extrachromosomally. Recombinant host cells as defined herein will express heterologous polypeptides or proteins, particularly revTeR repressors of the present invention, and RNA encoded by the DNA segment or synthetic gene in the recombinant transcriptional unit. This term also means host cells which have stably integrated a recombinant genetic element or elements having a regulatory role in gene expression, for example, promoters or enhancers. Recombinant expression systems as defined herein will express RNA, polypeptides or proteins endogenous to the cell upon induction of the regulatory elements linked to the endogenous DNA segment or gene to be expressed. The cells can be prokaryotic or eukaryotic.

[0059] As used herein, “prokaryotic organism” includes members of Eubacteria and Archaea.

[0060] As used herein, the one letter and three letter abbreviations for amino acids are in accord with their common usage and the IUPAC-IUB Commission on Biochemical Nomenclature, see, (1972) Biochem. 11: 1726. Each naturally occurring L-amino acid is identified by the standard three letter code or the standard three letter code with or without the prefix “L-”; the prefix “D-” indicates that the stereoisomeric form of the amino acid is D.

[0061] As used herein, mutations within the class B-class D chimeric modified repressor are indicated by the wild type amino acid residue, the amino acid position corresponding to SEQ ID NO: 32, and the mutant amino acid residue. For example, G96R shall mean a mutation from glycine to arginine at position 96 in the chimeric modified repressor. Mutations in other classes of repressor will be indicated by the gene, its classification, the wild type amino acid residue, the amino acid position corresponding to the representative of the class as indicated above, and as shown in FIG. 1, and the mutant amino acid residue.

[0062] 5.2 Modified Tetracycline Repressors

[0063] 5.2.1 Tetracycline Repressors Exhibiting a Reverse Phenotype in Prokaryotes

[0064] As used herein, “tetracycline analog” or “Tc analog” is intended to include compounds which are structurally related to tetracycline and which bind to the Tet repressor with a Kₐ of at least about 10⁻⁶ M. Preferably, the tetracycline analog binds with an affinity of about 10⁻⁹ M or greater. Examples of such tetracycline analogs include, but are not limited to, anhydrotetracycline (atc), doxycycline, chlorotetracycline, oxytetracycline and others disclosed by Hlavka and Boothe, “The Tetracyclines,” in Handbook of Experimental Pharmacology 78, R. K. Blackwood et al. (eds.), Springer-Verlag, Berlin, N.Y., 1985; L. A. Mitscher, “The Chemistry of the Tetracycline Antibiotics”, Medicinal Research 9, Dekker, N.Y., 1978; Noyee Development Corporation, “Tetracycline Manufacturing Processes” Chemical Process Reviews, Park Ridge, N.J., 2 volumes, 1969; R. C. Evans, “The Technology of the Tetracyclines,” Biochemical Reference Series 1, Quadrangle Press, New York, 1968; and H. F. Dowling, “Tetracycline,” Antibiotic Monographs, no. 3, Medical Encyclopedia, New York, 1955. For use in prokaryotic organisms, a Tc analog can be chosen which has reduced antibiotic activity as compared to Tc, such as, but not limited to, anhydrotetracycline.

[0065] As used herein, “wild-type Tet repressor” is intended to describe a protein occurring in nature which represses transcription via binding to a tet operator sequence in a prokaryotic cell in the absence of Tc. The difference(s) between a modified Tet repressor and a wild-type Tet repressor may be substitution of one or more amino acids, deletion of one or more amino acids or addition of one or more amino acids. The term is intended to include repressors of different class types, such as but not limited to, TetR(A), TetR(B), TetR(C), TetR(D), TetR(E), TetR(G), TetR(H), TetR(J), and TetR(Z).

[0066] In light of the high degree of sequence conservation (at least 80%) among members of each class of Tet repressor, a single member of each class of Tet repressor is used herein as representative of the entire class. Accordingly, the teaching of the present invention with respect to a specific member of a Tet repressor class is directly applicable to all members of that class.

[0067] As used herein, the TetR(A) class is represented by the Tet repressor carried on the Tn1721 transposon (Allmeir et al. (1992) Gene 111(1): 11-20; NCBI (National Library of Medicine, National Center for Biotechnology Information) accession number X61367 and database cross reference number (GI:) for encoded protein sequence GI:48198). This representative TetR(A) protein sequence is provided as SEQ ID NO: 34, encoded by the nucleotide sequence of SEQ ID NO: 33.

[0068] The TetR(B) class is represented by a Tet repressor encoded by a Tn10 tetracycline resistance determinant (Postle et al. (1984) Nucleic Acids Research 12(12): 4849-63, Accession No. X00694, GI:43052). This representative TetR(B) protein sequence is provided as SEQ ID NO: 36, which is encoded by the nucleotide sequence of SEQ ID NO: 35.

[0069] The TetR(C) class is represented by the tetracycline repressor of the plasmid pSC101 (Brow et al. (1985) Mol. Biol. Evol. 2(1): 1-12, Accession No. M36272, GI:150496). This representative TetR(C) protein sequence is provided as SEQ ID NO: 38, which is encoded by the nucleotide sequence of SEQ ID NO: 37.

[0070] The TetR(D) class is represented by the Tet repressor identified in Salmonella ordonez (Allard et al. (1993) Mol. Gen. Genet. 237(1-2): 301-5, Accession No. X65876, GI:49075). This representative TetR(D) protein sequence is provided as SEQ ID NO: 40, which is encoded by the nucleotide sequence of SEQ ID NO: 39.

[0071] The TetR(E) class is represented by a Tet repressor isolated from a member of Enterobacteriaceae (Tovar et al. (1988) Mol. Gen. Genet. 215(1): 76-80, Accession No. M34933, GI:155020). This representative TetR(E) protein sequence is provided as SEQ ID NO: 42, which is encoded by the nucleotide sequence of SEQ ID NO: 41.

[0072] The TetR(G) class is represented by a Tet repressor identified in Vibrio anguillarum (Zhao et al. (1992) Microbiol Immunol 36(10): 1051-60, Accession No. S52438, GI:262929). This representative TetR(G) protein sequence is provided as SEQ ID NO: 44, which is encoded by the nucleotide sequence of SEQ ID NO: 43.

[0073] The TetR(H) class is represented by a Tet repressor encoded by plasmid pMV111 isolated from Pasteurella multocida (Hansen et al. (1993) Antimicrob. Agents. Chemother. 37(12): 2699-705, Accession No. U00792, GI:392872). This representative TetR(H) protein sequence is provided as SEQ ID NO: 46, which encoded by the nucleotide sequence of SEQ ID NO: 45.

[0074] The TetR(J) class is represented by a Tet repressor cloned from Proteus mirabilis (Magalhaes et al. (1998) Biochim. Biophys. Acta. 1443(1-2): 262-66, Accession No. AF038993, GI:4104706). This representative TetR(J) protein sequence is provided as SEQ ID NO: 48, which is encoded by the nucleotide sequence of SEQ ID NO: 47.

[0075] The TetR(Z) class is represented by a Tet repressor encoded by the pAG1plasmid isolated from the gram-positive organism Corynebacterium glutamicum (Tauch et al. (2000) Plasmid 44(3): 285-91, Accession No. AAD25064, GI:4583400). This representative TetR(Z) protein sequence is provided as SEQ ID NO: 50, which is encoded by the nucleotide sequence of SEQ ID NO: 49.

[0076] As used herein, “tet operator,” “tet operator sequence,” or tetO, is intended to encompass all classes of tet operator sequences, such as but not limited to tetO(A), tetO(B), tetO(C), tetO(D), tetO(E), tetO(G), tetO(H), tetO(J) and tetO(Z). The nucleotide sequences of Tet repressors of members of the A, B, C, D, E, G, H, J and Z classes, and their corresponding tet operator sequences are known, and can be used in the present invention. See, for example, Waters, S. H. et al. (1983) Nucl. Acids Res 11:6089-6105, Hillen, W. and Schollmeier, K. (1983) Nucl. Acids Res. 11:525-539 and Postle, K. et al. (1984) Nucl. Acids Res. 12:4849-4863, Unger, B. et al. (1984) Gene 31: 103-108, Unger, B. et al. (1984) Nucl Acids Res. 12:7693-7703 and Tovar, K. et al. (1988) Mol. Gen. Genet. 215:76-80, which are incorporated herein by reference in their entireties.

[0077] As used herein, “modified tetracycline repressor,” “modified tetracycline repressor exhibiting a reverse phenotype,” “revTetR,” or “revTetR protein” is intended to include polypeptides having an amino acid sequence which is similar to one or more wild-type Tet repressor but which has at least one amino acid difference from a wild-type Tet repressor that confers greater binding affinity to a tet operator sequence in prokaryotes in the presence of tetracycline or its analog than in the absence of tetracycline or its analog. A revTetR provided herein has the following functional properties: 1) the polypeptide can bind to a tet operator sequence, i.e., it retains the DNA binding specificity of a wild-type Tet repressor; and 2) it is regulated in a reverse manner by tetracycline than a wild-type Tet repressor, i.e., the modified Tet repressor binds to a tet operator sequence with a greater binding affinity (or a lower dissociation constant, K_{d}) in the presence of Tc or Tc analog, than in the absence of Tc or its analog. Moreover, the affinity of a revTetR protein of the present invention for a tet operator sequence is substantially proportional to the concentration of tetracyline; that is, as the concentration of tetracycline or analog thereof increases, the binding affinity of the revTetR protein for the tet operator sequence increases. Preferably, this reverse phenotype of the revTetR is only displayed in a prokaryote, and not in a eukaryote. The term modified tetracycline repressor or revTetR is intended to include modified TetR of different class types, such as but not limited to TetR(A), TetR(B), TetR(C), TetR(D), TetR(E), TetR(G), TetR(H), TetR(J), and TetR(Z), as well as “chimeric tetracycline repressor” or “chimeric revTetR”.

[0078] As used herein, “chimeric tetracycline repressor” or “chimeric revTetR” is intended to include polypeptides having an amino acid sequence comprising amino acid residues derived from more than one type of tetracycline repressor and exhibits the reverse phenotype in prokaryotes. The term is intended to include chimeric tetracycline repressors constructed from different class types, such as but not limited to, TetR(A), TetR(B), TetR(C), TetR(D), TetR(E), TetR(G), TetR(H), TetR(J), and TetR(Z). In certain embodiments, the chimeric tetracycline repressors of the present invention comprise an amino-terminal DNA-binding domain and a carboxy-terminal tetracycline binding domain, including but not limited to the corresponding domains of the TetR(A), TetR(B), TetR(C), TetR(D), TetR(E), TetR(G), TetR(H), TetR(J), and TetR(Z). Such chimeric tetracycline repressors further comprise at least one amino acid substitution that confers the reverse phenotype. A chimeric revTetR retains the DNA binding specificity of the DNA binding domain of a wild-type Tet repressor. Preferably, this reverse phenotype of the chimeric revTetR is only displayed in a prokaryote, and not in a eukaryote. In preferred embodiments, the chimeric revTetR is a “TetR(BD)” comprising about amino acids 1 to 50 from TetR(B) (SEQ ID NO: 36) operatively linked to amino acid residues about 51 to 208 of TetR(D) (SEQ ID NO: 40) and that further comprises at least one substitution that confers binding to DNA containing a tet operator sequence with a greater affinity (i.e., lower dissociation constant K_{d}) in the presence of a tetracycline (Tc) or tetracycline analog, compared to DNA binding in the absence of a tetracycline (Tc) or tetracycline analog.

[0079] The term “modified tetracycline repressor” or “modified revTetR” further include Tet repressors wherein the amino-terminal DNA-binding domain is derived from a DNA-binding protein other than a TetR repressor protein, and the DNA sequence to which such a chimeric tetracycline repressor protein binds corresponds to the DNA sequence recognized and bound by the non-TetR repressor, DNA-binding protein. Non-limiting examples of such DNA-binding proteins include, but are not limited to, the cro repressor, 454 repressor and CI repressor of bacteriophage λ, as well as the hin, gin, cin, and pin recombinase proteins (see, Feng et al. (1994) Science 263: 348-55).

[0080] In a preferred embodiment, the parent Tet repressors from which the chimeric repressors of the present invention are constructed are TetR of classes B and D (see Schnappinger et al., (1998) EMBO J. 17:535-543), and the tet operator sequence is a class B tet operator sequence.

[0081] In preferred embodiments, the “modified tetracycline repressor” or “modified revTetR” or “chimeric revTetR” of the present invention is not a fusion protein comprising a protein or protein portion that activates transcription in a eukaryotic cell.

[0082] As described in detail below, the inventor discovered that revTetR that are active in prokaryotic organisms have amino acid substitutions that tend to be localized in discrete regions of the polypeptide sequence. In particular, the inventor discovered that nucleotide substitutions that result in at least one codon change in amino acid residues from positions 70, 71, 91 to 103, 157-159 and 192 to 205 of SEQ ID NO: 32 appear to be important for the reverse phenotype in prokaryotic organisms. In addition, nucleotide substitutions that result in at least one codon change in amino acid residues found within the following regions also appear to be important for the reverse phenotype in prokaryotic organisms: residues from positions 13-25, more specifically 14-24, and even more specifically residues from positions 17-23, 53-61, and/or 95-99 of SEQ ID NO: 32.

[0083] The crystal structure of a Tet repressor-tetracycline complex, as described in Hinrichs, W. et al. (1994) Science 264: 418-420, can be used for the rational design of mutant Tet repressors. The polypeptide folds into 10 alpha helices, α1 to α10. Helices α7 to α10 are apparently involved in the dimerization of the repressor. More specifically, Hinrichs further described the tetracycline repressor protein as made up of a “protein core” and DNA binding domains. The DNA core comprises α-helices α5 to α10. The tetracycline binding pocket is formed with the carboxy-termini of the α4 and α6 helices along with the α5, α7, α8′, and α9′ helices (where the prime indicates that the helix is part of the second repressor of the DNA-binding and tetracycline-binding dimer). The DNA binding domains are formed with α helices α1-α3 of both repressor proteins of the dimer and the DNA-binding domains are connected to the core through the α4 helix. The amino sequence of each of the ten α helices of the TetR(B) and TetR(D) are provided in Schnappinger et al. (1998) EMBO J. 17(2): 535-543. Accordingly, each of these ten helices appears to include the following indicated amino acid residues as provided in SEQ ID NO: 32: α1, amino acid residues 5-21; α2, amino acid residues 27-34; α3, amino acid residues 38-44; α4, amino acid acid residues 48-64; α5, amino acid residues 74-92; α6, amino acid residues 95-100; α7, amino acid residues 110-123; α8, amino acid residues 128-154; α9, amino acid residues 167-178; and α10, amino acid residues 183-203.

[0084] Therefore, based upon the crystal structure, amino acid positions 70 and 71 are located prior to α5 of the tetracycline-binding pocket and yet amino acid substitutions at this site appear to contribute to the desired functional properties of a revTetR. Moreover, amino acid positions 95, 96, 98, 101 and 103 located within a6 that forms a part of the conserved tetracycline-binding pocket, and amino acid positions 188, 192, 196 and 200 located within α10 also appear to be involved in conferring the reverse phenotype to a revTetR. In addition, as demonstrated below amino acid substitutions within the peptide sequence within or adjacent to the α1 helix involved in DNA binding, i.e. spanning amino acids 13-25, particularly 14-24, and more particularly 17-23, especially residues 18, 20, and 22, and even more particularly, residue 18, appear to contribute to the desired functional properties of a revTetR. Similarly, amino acid substitutions within the α4 helix involved in tetracycline binding as well as connecting the DNA-binding domain to the core protein, i.e. the peptide sequence spanning amino acids 53-61, particularly residues 53, 56, 59, and 61, and more particularly amino acid residues 56 and 59, appear to contribute to the desired functional properties of a revTetR. Moreover, amino acid substitutions within the α6 helix which, as noted above, forms part of the conserved tetracycline-binding pocket, i.e. the peptide sequence spanning amino acids 95-99, particularly amino acid residues 99 and 96, appear to contribute to the desired functional properties of a revTetR. These observations suggest, without being bound by any theory, that these mutations may alter the relative position of the monomers in the dimer or alter the resulting conformation or relative position of the DNA binding domain such that upon binding of tetracycline or tetracycline analog, the proper conformation for binding to DNA is restored, rather than perturbed.

[0085] Accordingly, in certain embodiments, the modified tetracycline repressor polypeptides exhibiting a reverse phenotype in prokaryotic organisms of the present invention comprise at least one, at least two, or at least three amino acid substitutions within any helix of helices α1-α10 of a tetracycline repressor protein.

[0086] 5.2.2 Exemplary Modified Repressors

[0087] In one embodiment, the modified tetracycline repressor polypeptide is the TetR(BD) chimera (SEQ ID NO. 32) further comprising at least one amino acid substitution at position 96 or 99, or substitutions at positions 96, 103 and 114; positions 96, 157 and 200; positions 96 and 159; positions 160, 178, 196; positions 59, 95 and 100; positions 96 and 188; positions 96 and 205; positions 96 and 110; positions 99 and 194; positions 99 and 158; positions 70, 91 and 99; positions 71, 95 and 127; positions 59, 98, 101 and 192.

[0088] Presently preferred amino acid substitutions that confer a reverse phenotype in prokaryotes in a TetR(BD) chimera include, but are not limited to, Asn at position 59, Val at positions 70 and 71; Gln at position 91; Glu and Gly at position 95; Arg and Glu at position 96; Arg at position 98; Glu at position 99; Ala at position 100; His at position 101; Ser at position 103; Phe at position 110; Val at position 114; Arg at position 127; Asn at position 157; Cys at position 158; Leu at position 159; Gln at position 188; Gly at position 192; Val at position 194; Trp at position 196; His at position 200; and Ser at position 205. In more preferred embodiments, the revTetR repressor polypeptide is selected from any of the amino acid sequences set forth in SEQ ID NOS. 2, 4, 6, 8, 10, 12, 14, 16, 18, 20, 22, 24, 26, 28 and 30.

[0089] Additional amino acid substitutions that confer a reverse phenotype in prokaryotes in a TetR(BD) chimera include those amino acid substitutions provided in Table 3. Accordingly, revTetR polypeptides of the present invention are also selected from those comprising an amino acid sequence selected from the group consisting of SEQ ID NOS.: 71 to 264.

[0090] Table 1 discloses the designation (TetRev) of specific RevTetR-containing isolates and the corresponding SEQ ID NO. and amino acid substitution(s) present in those isolates, as compared with the amino acid sequence of the corresponding wild-type chimeric tetracycline repressor protein (SEQ ID NO: 32).

TABLE 1

| Mutant Name | SEQ ID NO: | Amino Acid Substitutions | | | | | | |
|---|---|---|---|---|---|---|---|---|
| TetRrevAtc4-1 | 71 | A50S | D53F | A56G | V57I | H63Q | | |
| TetRrevAtc4-10 | 72 | I59N | L60F | A61G | | | | |
| TetRrevAtc4-11 | 73 | L55L | A56P | R62S | | | | |
| TetRrevAtc4-13 | 74 | E58N | I59T | L60F | H63Y | | | |
| TetRrevAtc4-14 | 75 | L51L | D53Q | V57V | E58K | L60L | A61V | R62P |
| | | H63D | | | | | | |
| TetRrevAtc4-16 | 76 | D53N | A54G | V57F | I59S | L60F | | |
| TetRrevAtc4-17 | 77 | L52M | A56P | V57L | E58V | | | |
| TetRrevAtc4-18 | 78 | E58N | I59T | L60F | H63Y | | | |
| TetRrevAtc4-19 | 79 | R49H | A56P | V57L | L60M | | | |
| TetRrevAtc4-2 | 80 | R49G | L55L | V57V | E58N | R62L | H63Q | |
| TetRrevAtc4-20 | 81 | V57V | E58K | L60V | A61T | R62G | | |
| TetRrevAtc4-21 | 82 | K6K | D53F | L55L | V57L | I59S | A61S | |
| TetRrevAtc4-22 | 83 | R49H | A56P | V57L | L60M | | | |
| TetRrevAtc4-23 | 84 | A50D | L51V | L52Q | A54A | L55L | A61S | |
| TetRrevAtc4-24 | 85 | A56P | V57A | E58Q | H63Q | | | |
| TetRrevAtc4-25 | 86 | K48K | V57L | E58V | I59T | L60F | R62S | |
| TetRrevAtc4-28 | 87 | V57V | E58K | L60V | R62G | | | |
| TetRrevAtc4-29 | 88 | E58N | I59T | L60F | H63Y | | | |
| TetRrevAtc4-3 | 89 | D53E | A54S | I59M | A61P | | | |
| TetRrevAtc4-31 | 90 | A50S | D53Y | A56G | V57I | H63Q | | |
| TetRrevAtc4-37 | 91 | R49R | L52L | D53E | A54S | L55L | A61P | |
| TetRrevAtc4-4 | 92 | I59S | R62S | | | | | |
| TetRrevAtc4-40 | 93 | A56P | L60L | A61G | R62R | | | |
| TetRrevAtc4-43 | 94 | L52V | A56V | V57L | I59T | A61S | | |
| TetRrevAtc4-44 | 95 | D53Y | L55M | A56C | L60F | A61A | H63N | |
| TetRrevAtc4-47 | 96 | L51L | E58A | I59N | H63Y | | | |
| TetRrevAtc4-48 | 97 | D53N | A54S | L55L | A56P | V57V | A61A | R62L |
| TetRrevAtc4-5 | 98 | I59F | A61S | H64Q | A97T | | | |
| TetRrevAtc4-52 | 99 | D53F | A54T | L55M | I59S | H63Q | | |
| TetRrevAtc4-53 | 100 | D53F | L55M | I59S | H63Q | | | |
| TetRrevAtc4-59 | 101 | D53Y | L55M | A56C | L60F | H63N | | |
| TetRrevAtc4-6 | 102 | D53Y | L55L | A56P | R62L | | | |
| TetRrevAtc4-61 | 103 | L51L | A56V | I59H | R62L | | | |
| TetRrevAtc4-67 | 104 | K48K | D53Y | A56G | E58G | | | |
| TetRrevAtc4-7 | 105 | I59R | L55L | A61E | H64N | | | |
| TetRrevAtc4-70 | 106 | D53A | A61P | | | | | |
| TetRrevAtc4-71 | 107 | D53T | L55M | 56P | A61S | | | |
| TetRrevAtc4-8 | 108 | E58N | I59T | L60F | H63Y | | | |
| TetRrevAtc4-9 | 109 | L52M | A56P | V57L | E58V | L60L | H188Y | |
| TetRrevAtc4-9b | 110 | A56P | V57L | E58V | L60L | | | |
| TetRrevDox4-1 | 111 | D53E | A54S | A61P | | | | |
| TetRrevDox4-2 | 112 | D53E | A54S | I59M | A61P | | | |
| TetRrev04-1 | 113 | G96E | K98T | | | | | |
| TetRrev04-4 | 114 | G96E | V113A | | | | | |
| TetRrev6-13 | 115 | G96R | L101I | | | | | |
| TetRrev6-17 | 116 | R94G | G96W | | | | | |
| TetRrev6-2 | 117 | D95G | G96R | H100L | | | | |
| TetRrev6-30 | 118 | G96Q | G102S | | | | | |
| TetRrev6-23 | 119 | D95E | A97E | | | | | |
| TetRrev6-25 | 120 | Y93S | D95E | G102A | | | | |
| TetRrev6-26 | 121 | Y93F | G96W | A97E | H100N | | | |
| TetRrev6-27 | 122 | A71T | G96E | | | | | |
| TetRrev6-28 | 123 | G96R | A97S | V99L | | | | |
| TetRrev6-29 | 124 | A97T | K98R | V99G | | | | |
| TetRrev6-3 | 125 | V99G | H100P | | | | | |
| TetRrev6-31 | 126 | G96Q | G102S | | | | | |
| TetRrev6-32 | 127 | L79V | A97T | K98R | V99G | | | |
| TetRrev6-33 | 128 | A97T | K98R | V99G | | | | |
| TetRrev6-34 | 129 | R94L | D95A | H100 | | | | |
| TetRrev6-35 | 130 | D95Y | V99E | | | | | |
| TetRrev6-36 | 131 | R94L | D95A | H100Q | | | | |
| TetRrev6-37-1 | 132 | G96R | A97S | V99L | | | | |
| TetRrev6-38 | 133 | Y93H | G96W | K98Q | V99G | | | |
| TetRrev6-39 | 134 | G96Q | G102S | | | | | |
| TetRrev6-40 | 135 | Y93N | G96W | V99G | | | | |
| TetRrev6-50 | 136 | V99G | | | | | | |
| TetRrev6-51 | 137 | A97T | V99G | | | | | |
| TetRrev6-53 | 138 | A97P | K98R | V99D | | | | |
| TetRrev6-54 | 139 | Y93F | D95N | V99F | | | | |
| TetRrev4/6-3 | 140 | D95A | V99G | | | | | |
| TetRrev4/6-4 | 141 | D95A | V99G | V57V | A61G | | | |
| TetRrev4/6-5 | 142 | A54S | V99R | | | | | |
| TetRrev4/6-6 | 143 | D53Y | V57V | A61P | | | | |
| TetRrev4/6-7 | 144 | L55L | L60V | A97V | V99G | | | |
| TetRrev4/6-10 | 145 | A56S | V99E | | | | | |
| TetRrev4/6-15 | 146 | A56S | I59A | L60W | V99V | | | |
| TetRrev4/6-17 | 147 | G99R | V99L | L101I | | | | |
| TetRrev4/6-24 | 148 | A61T | V99R | | | | | |
| TetRrev4/6-25 | 149 | I59S | L60L | R62G | D95A | V99L | | |
| TetRrev4/6-27 | 150 | V99R | | | | | | |
| TetRrev1/34: | 151 | L17S | E23K | | | | | |
| TetRrev3/38 | 152 | L17H | I22F | E23G | | | | |
| TetRrev19/48 | 153 | N18K | E19D | V20L | I22N | E23A | | |
| TetRrev22/5 | 154 | E15V | L17A | E19D | | | | |
| TetRrev25/43 | 155 | L17F | E19- | G24G | | | | |
| TetRrev28/8 | 156 | L14S | N18Y | I22F | L25L | | | |
| TetRrev28/16 | 157 | L14L | E15A | L17G | L25V | | | |
| TetRrev28/23 | 158 | A13A | L14S | N18K | E23V | | | |
| TetRrev28/26 | 159 | L14T | N18Y | G21G | I22F | | | |
| TetRrev28/27 | 160 | L17G | I22M | | | | | |
| TetRrev28/30 | 161 | V20G | G21A | I22I | E23G | | | |
| TetRrev28/31 | 162 | A13A | V20G | G21R | I22N | G24G | | |
| TetRrev28/36 | 163 | N18I | E19G | V20G | E23V | | | |
| TetRrev28/40 | 164 | L14S | N18Y | I22F | L25L | | | |
| TetRrev28/41 | 165 | L17L | N18D | V20R | I22N | | | |
| TetRrev28/46 | 166 | A13A | V20G | G21R | I22N | G24G | | |
| TetRrev28/48 | 167 | N18Y | V20D | I22T | W43S | | | |
| TetRrev28/49 | 168 | N18Y | V20D | I22T | | | | |
| TetRrev29/9 | 169 | L17V | N18Y | G21G | I22T | | | |
| TetRrev29/17 | 170 | L17S | E23D | | | | | |
| TetRrev29/24 | 171 | E15V | L17F | N18Y | I22M | E23K | | |
| TetRrev29/25 | 172 | G21- | I22- | E23- | G24S | | | |
| TetRrev29/27 | 173 | L14E | V20G | | | | | |
| TetRrev29/35 | 174 | L17S | E23D | | | | | |
| TetRrev29/42 | 175 | E19D | G96R | | | | | |
| TetRrev29/44 | 176 | A13A | V20G | G21R | I22N | G24G | | |
| TetRrev29/52 | 177 | L14V | L17V | N18K | V20V | G24G | | |
| TetRrevAD1/2 | 178 | N18Y | L52L | D53Y | A54A | I59T | | |
| TetRrevAD1/6 | 179 | N18Y | E23V | D53A | A54S | L55L | A56S | A61T |
| | | H63Y | | | | | | |
| TetRrevAF1/7 | 180 | G96R | L101I | | | | | |
| TetRrevAF1/8 | 181 | G24G | Y93N | L101F | G102D | | | |
| TetRrevAF1/11 | 182 | L14I | V20V | I22L | R94H | A97A | V99E | |
| TetRrevAF2/5 | 183 | L14R | E!9E | D95H | L101P | | | |
| TetRrevAD2/4 | 184 | L17F | N18R | D53N | I59M | A61T | | |
| TetRrevAD2/6 | 185 | N18Y | G21E | E23K | | | | |
| TetRrevAD2/12 | 186 | E23H | D53Y | A56A | E58Q | I59T | | |
| TetRrevAD2/13 | 187 | E19D | V20E | E23K | V57L | I59N | L60F | A61A |
| TetRrevAD2/2 | 188 | L14I | G21R | A56V | | | | |
| TetRrevAF1/3 | 189 | G24G | D95A | G96R | | | | |
| TetRrevAF1/4 | 190 | N18K | D95V | G96V | A97V | | | |
| TetRrevAF1/5 | 191 | L14V | G24G | Y93D | R94G | D95G | | |
| TetRrevAD3/2 | 192 | A56P | E58H | A61A | H63Y | | | |
| TetRrevAD3/3 | 193 | G21- | I22- | E23- | G24S | | | |
| TetRrevAF2/7 | 194 | Y93C | D95E | A97T | | | | |
| TetRrevAF6/12 | 195 | L14F | E15E | G96V | K98E | V99L | L101P | |
| TetRrevAF7/1 | 196 | Y93C | G96R | K98N | | | | |
| TetRrevAF7/2 | 197 | L14V | E15V | E23D | K48K | G96L | G102A | |
| TetRrevAD3/5 | 198 | L17L | N18K | E19V | I22T | 53Y | A54S | |
| TetRrevAD3/6 | 199 | V20G | A56P | I59L | R62R | | | |
| TetRrevAD3/7 | 200 | L17M | E19D | L52L | D53Y | A54A | A56E | |
| TetRrevAD3/8 | 201 | L16L | A56A | V57E | E58L | I59N | L60A | |
| TetRrevAF2/14 | 202 | L14L | E15A | L16L | L17V | N18N; | V20V | G96V |
| TetRrevAF2/15 | 203 | V20G | I22N | R49Q | A50T | | | |
| TetRrevAF2/16 | 204 | E19V | Y93C | D95Y | A97T | K98N | V99L | L101L |
| TetRrevAF3/5 | 205 | V20F | G21R | R49S | | | | |
| TetRrevAD3/9 | 206 | E15Q | L17L | L55M | I59R | | | |
| TetRrevAD3/10 | 207 | N18Y | G24G | L51L | D53Y | A54V | | |
| TetRrevAD3/11 | 208 | L14V | G24G | Y93D | R94G | D95G | | |
| TetRrevAF3/6 | 209 | E23K | D95H | L101H | | | | |
| TetRrevAF3/7 | 210 | L17H | I22F | A97P | | | | |
| TetRrevAF3/8 | 211 | E15V | L16L | N18H | E19D | V20D | R94P | D95H |
| | | H100N | | | | | | |
| TetRrevAF3/10 | 212 | G96G | V99G | H100P | | | | |
| TetRrevAF4/1 | 213 | E15V | V20A | I22F | E23Q | L25L | G96V | K98E |
| | | G102G | | | | | | |
| TetRrevAF4/3 | 214 | L16Q | N18H | E19V | V20G | I22I | G96T | |
| TetRrevAF4/4 | 215 | G24A | R94P | D95E | G102D | | | |
| TetRrevAF4/5 | 216 | E15G | L16L | D95A | V99G | | | |
| TetRrevAF4/6 | 217 | E15D | L17I | N18T | E23G | A54V | D95A | |
| TetRrevAF4/7 | 218 | L14V | A97T | V99G | | | | |
| TetRrevAF4/8 | 219 | L14F | E23A | G96M | A97P | L101P | | |
| TetRrevAF4/9 | 220 | L16R | E19D | E23D | D95G | V99A | G102G | |
| TetRrevAD2/5 | 221 | L17F | L55L | L60F | R62V | | | |
| TetRrevAD2/8 | 222 | V20G | D53N | A54A | A56G | V57L | I59F | L60L |
| | | R62R | | | | | | |
| TetRrevAD2/1 | 223 | G21G | L51L | D53Y | L55L | A56P | A61E | |
| TetRrevAF5/10 | 224 | R94P | G96VO | A97T | K98N | H100Q | | |
| TetRrevAF4/12 | 225 | L16Q | N18Y | A97G | H100S | | | |
| TetRrevAF4/13 | 226 | A13A | E15D | L17L | E19V | I22I | E23K | R94H |
| | | G95N | | | | | | |
| TetRrevAF5/1 | 227 | L14F | D95A | V99G | | | | |
| TetRrevAF5/3 | 228 | E15G | N18K | R94H | G96G | G102V | | |
| TetRrevAF5/5 | 229 | L14V | L17F | V20A | I22M | L25F | D95H | |
| TetRrevAF5/6 | 230 | N18H | L25F | A97P | K98N | L101H | | |
| TetRrevAF5/7 | 231 | E15A | G96M; | A97P | L101P | | | |
| TetRrevAF5/8 | 232 | I22I | R94P | V99E | | | | |
| TetRrevAF5/9 | 233 | R94C | V99E | | | | | |
| TetRrevAF5/11 | 234 | N18K | E19A | L101L | G102S | | | |
| TetRrevAF5/13 | 235 | L14L | V20G | V99E | | | | |
| TetRrevAF6/1 | 236 | A13A | E19V | V20A | D95I | G96G | | |
| TetRrevAF6/2 | 237 | N18D | 23A | D95N | H100P | L101S | | |
| TetRrevAF6/3 | 238 | G96G | V99G | H100P | | | | |
| TetRrevAF6/4 | 239 | Y93Y | G96R | A97P | | | | |
| TetRrevAF6/5 | 240 | V20V | I22V | E23D | D95N | H100P | | |
| TetRrevAF6/6 | 241 | D95Y | G96E | V99V | | | | |
| TetRrevAF6/7 | 242 | G96G | V99G | H100P | | | | |
| TetRrevAF6/8 | 243 | A71T | G96E | | | | | |
| TetRrev96/99-1 | 244 | G96H | V99R | | | | | |
| TetRrev96/99-2 | 245 | G99K | V99A | | | | | |
| TetRrev96/99-3 | 246 | G96E | V99T | | | | | |
| TetRrev96/99-4 | 247 | G96P | V99S | | | | | |
| TetRrev96/99-5 | 248 | G96I | V99K | | | | | |
| TetRrev96/99-6 | 249 | G96N | V99Q | | | | | |
| TetRrev96/99-7 | 250 | G96L | V99K | | | | | |
| TetRrev96/99-8 | 251 | G96N | V99H | | | | | |
| TetRrev96/99-9 | 252 | G96H | V99N | | | | | |
| TetRrev96/99-10 | 253 | G96N | V99P | | | | | |
| TetRrev96/99-11 | 254 | G96R | V99Y | | | | | |
| TetRrev96/99-12 | 255 | G96H | V99Q | | | | | |
| TetRrev96/99-13 | 256 | G96T | V99D | | | | | |
| TetRrev96/99-14 | 257 | G96N | V99N | | | | | |
| TetRrev96/99-15 | 258 | G96P | V99P | | | | | |
| TetRrev96/99-16 | 259 | G96P | V99Y | | | | | |
| TetRrev96/99-17 | 260 | G96T | V99K | | | | | |
| TetRrev96/99-18 | 261 | G96T | V99P | | | | | |
| TetRrev96/99-19 | 262 | G96R | V99S | | | | | |
| TetRrev96/99-20 | 263 | G96S | V99K | | | | | |
| TetRrev96P | 264 | G96P | | | | | | |

[0091] Nucleotide substitutions within the nucleic acid sequence of SEQ ID NO: 31 that confer a reverse phenotype on the encoded tetracycline repressor protein and that correspond to the mutants listed in Table 1, are provided in Table 2, which discloses the designation (TetRev) of specific RevTetR-containing isolates and the corresponding SEQ ID NO. and nucleotide substitution(s) present in those isolates, as compared with the nucleotide sequence encoding the corresponding wild-type chimeric tetracycline repressor protein (SEQ ID NO: 31).

TABLE 2

| | SEQ ID | | | | | | |
|---|---|---|---|---|---|---|---|
| Mutant Name | NO: | Preferred Nucleotide Substitutions | | | | | |
| TetRrevAtc4-1 | 265 | gcc50tcc | gat53ttt | gcg56ggg | gtg57att | cat63cag | |
| TetRrevAtc4-10 | 266 | atc59aac | ttg60ttt | gcg61ggg | | | |
| TetRrevAtc4-11 | 267 | ctg55ctt | gcg56cct | cgt62agt | | | |
| TetRrevAtc4-13 | 268 | gag58aat | atc59acc | ttg60ttc | cat63tat | | |
| TetRrevAtc4-14 | 269 | cta51ctc | gat53caa | gtg57gtt | gag58aag | tta60tta | gcg61gtg |
| | | cgt62cct | cat63gac | | | | |
| TetRrevAtc4-16 | 270 | gat63aac | gcg54ggg | gtg57ttt | atc59agc | ttg60ttt | |
| TetRrevAtc4-17 | 271 | ctg52atg | gcg56ccg | gtg57ttg | gag58gtg | | |
| TetRrevAtc4-18 | 272 | gat58aat | atc59acc | ttg60ttc | cat63tat | | |
| TetRrevAtc4-19 | 273 | cgg49cat | gcg56cct | gtg57ctg | ttg60atg | | |
| TetRrevAtc4-2 | 274 | cgg49ggc | ctg55ttg | gtg57gtt | gag58aac | cgt62ctt | cat63caa |
| TetRrevAtc4-20 | 275 | gtg57gtt | gag58aag | ttg60gtt | gcg61acg | cgt62ggt | |
| TetRrevAtc4-21 | 276 | aaa6aag | gat53ttt | ctg55ctt | gtg57ctg | atc59agc | gcg61tcg |
| TetRrevAtc4-22 | 277 | cgg49cat | gcg56cct | gtg57ctg | ttg60atg | | |
| TetRrevAtc4-23 | 278 | gcc50gac | cta51gta | ctg52cag | gcg54gct | ctg55ctt | gcg61tcg |
| TetRrevAtc4-24 | 279 | gcg56gtg | gtg57gcg | gag58cag | cat63caa | | |
| TetRrevAtc4-25 | 280 | aag48aaa | gtg57ttg | gag58gtg | atc59acc | ttg60ttt | cgt62agt |
| TetRrevAtc4-28 | 281 | gtg57gtc | gag58aag | ttg60gtt | cgt62ggt | | |
| TetRrevAtc4-29 | 282 | gag58aat | atc59acc | ttg60ttc | cat63tat | | |
| TetRrevAtc4-3 | 283 | gat53gag | gcg54tcg | atc59atg | gcg61ccc | | |
| TetRrevAtc4-31 | 284 | gcc50tcc | gat53tat | gcg56ggg | gtg57att | cat63cag | |
| TetRrevAtc4-37 | 285 | cgg49cgt | ctg52ctt | gat53gaa | gcg54tct | ctg55ctc | gcg61ccg |
| TetRrevAtc4-4 | 286 | atc59agc | cgt62agc | | | | |
| TetRrevAtc4-40 | 287 | gcg56ccc | ttg60ctc | gcg61ggg | cgt62cgc | | |
| TetRrevAtc4-43 | 288 | ctg52gtg | gcg56gtg | gtg57ttg | atc59acc | gcg61tcg | |
| TetRrevAtc4-44 | 289 | gat53tat | ctg55atg | gcg56tgc | ttg60ttc | gcg61gct | cat63aat |
| TetRrevAtc4-47 | 290 | cta51ctc | gag58gcg | atc59aac | cat63tac | | |
| TetRrevAtc4-48 | 291 | gat53aat | gcg54tcg | ctg54ctc | gcg56ccg | gtg57gta | gcg61gct |
| | | cgt62ctc | | | | | |
| TetRrevAtc4-5 | 292 | atc59ttt | gcg61tcg | cat64caa | gca97aca | | |
| TetRrevAtc4-52 | 293 | gat53ttt | gcg54acg | ctg55atg | atc59agc | cat63caa | |
| TetRrevAtc4-53 | 294 | gat53ttt | ctg55atg | atc59agc | cat63caa | | |
| TetRrevAtc4-59 | 295 | gat53tat | ctg55atg | gcg56tgc | ttg60ttc | cat63aat | |
| TetRrevAtc4-6 | 296 | gat53tat | ctg55ttg | gcg56ccg | cgt62ctt | | |
| TetRrevAtc4-61 | 297 | cta51ctt | gcg56gtg | atc59cac | cgt62ctt | | |
| TetRrevAtc4-67 | 298 | aag48aaa | gat53tat | gcg56ggg | gag58ggg | | |
| TetRrevAtc4-7 | 299 | atc59agg | ctg55ctt | gcg61gag | cat64aat | | |
| TetRrevAtc4-70 | 300 | gat53gct | gcg61ccg | | | | |
| TetRrevAtc4-71 | 301 | gat53acc | ctg55atg | gcg56ccg | gcg61tcg | | |
| TetRrevAtc4-8 | 302 | gag58aat | atc59acc | ttg60ttc | cat63tat | | |
| TetRrevAtc4-9 | 303 | ctg52atg | gcg56ccg | gtg57ttg | gag58gtg | ttg60ctg | cat188tat |
| TetRrevAtc4-9b | 304 | gcg56ccg | gtg57ttg | gag58gtg | ttg60ctg | | |
| TetRrevDox4-1 | 305 | gat53gaa | gcg54tct | gcg61ccg | | | |
| TetRrevDox4-2 | 306 | gat53gag | gcg54tcg | atc59atg | gcg61ccc | | |
| TetRrev04-1 | 307 | ggg96gag | aaa98aca | | | | |
| TetRrev04-4 | 308 | ggg96gag | gtg113gcg | | | | |
| TetRrev6-13 | 309 | ggg96agg | ctc101atc | | | | |
| TetRrev6-17 | 310 | cgt94ggt | ggg96tgg | | | | |
| TetRrev6-2 | 311 | gac95ggc | ggg96agg | cac100ctc | | | |
| TetRrev6-30 | 312 | ggg96cag | ggc102agc | | | | |
| TetRrev6-23 | 313 | gac95gaa | gca97gaa | | | | |
| TetRrev6-25 | 314 | tac93tcc | gac95gaa | ggc102gcc | | | |
| TetRrev6-26 | 315 | tac93ttc | ggg96tgg | gca97gaa | cac100aac | | |
| TetRrev6-27 | 316 | gcg71acg | ggg96gag | | | | |
| TetRrev6-28 | 317 | ggg96agg | gca97tca | gtg99ctg | | | |
| TetRrev6-29 | 318 | gca97act | aaa98aga | gtg99ggg | | | |
| TetRrev6-3 | 319 | gtg99ggg | cac100ccc | | | | |
| TetRrev6-31 | 320 | ggg96cag | ggc102agc | | | | |
| TetRrev6-32 | 321 | ctg79gtg | gca97act | aaa98aga | gtg99ggg | | |
| TetRrev6-33 | 322 | gca97act | aaa98aga | gtg99ggg | | | |
| TetRrev6-34 | 323 | cgt94ctt | gac95gcc | cac100cag | | | |
| TetRrev6-35 | 324 | gac95tat | gtg99gag | | | | |
| TetRrev6-36 | 325 | cgt94ctt | gac95gcc | cac100cag | | | |
| TetRrev6-37-1 | 326 | ggg96agg | gca97tca | gtg99ctg | | | |
| TetRrev6-38 | 327 | tac93cac | ggg96tgg | aaa98caa | gtg99ggg | | |
| TetRrev6-39 | 328 | ggg96cag | ggc102agc | | | | |
| TetRrev6-40 | 329 | tac93aac | ggg96tgg | gtg99ggg | | | |
| TetRrev6-50 | 330 | gtg99ggg | | | | | |
| TetRrev6-51 | 331 | gca97aca | gtg99ggg | | | | |
| TetRrev6-53 | 332 | gca97cct | aaa98aga | gtg99gac | | | |
| TetRrev6-54 | 333 | tac93ttc | gac95aac | gtg99ttc | | | |
| TetRrev4/6-3 | 334 | gac95gcc | gtg99ggg | | | | |
| TetRrev4/6-4 | 335 | gac95gcc | gtg99ggg | gtg57gtt | gcg61ggg | | |
| TetRrev4/6-5 | 336 | gcg54tcg | gtg99cgg | | | | |
| TetRrev4/6-6 | 337 | gat53tat | gtg57gtt | gcg61cca | | | |
| TetRrev4/6-7 | 338 | ctg55ctt | ttg60gtg | gca97gta | gtg99ggg | | |
| TetRrev4/6-10 | 339 | gcg56tcg | gtg99gag | | | | |
| TetRrev4/6-15 | 340 | gcg56tcg | atc59gcc | ttg60tgg | gtg99gta | | |
| TetRrev4/6-17 | 341 | ggg99cgg | gtg99ctg | ctc101atc | | | |
| TetRrev4/6-24 | 342 | gcg61acg | gtg99cgg | | | | |
| TetRrev4/6-25 | 343 | atc59agc | ttg60ctg | cgt62ggt | gac95gcc | gtg99ttg | |
| TetRrev4/6-27 | 344 | gtg99cgg | | | | | |
| TetRrev1/34: | 345 | ctt17tct | gaa23aaa | | | | |
| TetRrev3/38 | 346 | ctt17cat | atc22ttc | gaa23gga | | | |
| TetRrev19/48 | 347 | aat18aag | gag19gac | gtc20ctc | atc22aac | gaa23gca | |
| TetRrev22/5 | 348 | gag15gtg | ctt17gct | gag19gat | | | |
| TetRrev25/43 | 349 | ctt17ttt | gag19--- | ggt24ggg | | | |
| TetRrev28/8 | 350 | tta14tca | aat18tat | atc22ttc | tta25ttg | | |
| TetRrev28/16 | 351 | tta14ttg | gag15gcg | ctt17ggt | tta25gta | | |
| TetRrev28/23 | 352 | gca13gcc | tta14tca | aat18aaa | gaa23gta | | |
| TetRrev28/26 | 353 | tta14aca | aat18tat | gga21ggc | atc22ttc | | |
| TetRrev28/27 | 354 | ctt17ggt | atc22atg | | | | |
| TetRrev28/30 | 355 | gtc20ggc | gga21gca | atc22att | gaa23gga | | |
| TetRrev28/31 | 356 | gca13gct | gtc20ggc | gga21cga | atc22aac | ggt24gga | |
| TetRrev28/36 | 357 | aat18ata | gag19ggg | gtc20ggc | gaa23gtc | | |
| TetRrev28/40 | 358 | tta14tca | aat18tat | atc22ttc | tta25ttg | | |
| TetRrev28/41 | 359 | ctt17ctc | aat18gat | gtc20cgc | atc22aac | | |
| TetRrev28/46 | 360 | gca13gct | gtc20ggc | gga21cga | atc22aac | ggt24gga | |
| TetRrev28/48 | 361 | aat18tat | gtc20gac | atc22acc | tgg43tcg | | |
| TetRrev28/49 | 362 | aat18tat | gtc20gac | atc22acc | | | |
| TetRrev29/9 | 363 | ctt17gtt | aat18tat | gga21ggg | atc22acc | | |
| TetRrev29/17 | 364 | ctt17tcc | gaa23gat | | | | |
| TetRrev29/24 | 365 | gag15gtg | ctt17ttt | aat18tat | atc22atg | gaa23aaa | |
| TetRrev29/25 | 366 | gga21--- | atc22--- | gaa23--- | ggt24tcg | | |
| TetRrev29/27 | 367 | tta14gaa | gtc20ggc | | | | |
| TetRrev29/35 | 368 | ctt17tct | gaa23gac | | | | |
| TetRrev29/42 | 369 | gag19gat | ggg96agg | | | | |
| TetRrev29/44 | 370 | gca13gct | gtc20ggc | gga21cga | atc22aac | ggt24gga | |
| TetRrev29/52 | 371 | tta14gta | ctt17gtt | aat18aaa | gtc20gta | ggt24gga | |
| TetRrevAD1/2 | 372 | aat18tat | ctg52ctc | gat53tat | gcg54gcc | atc59acc | |
| TetRrevAD1/6 | 373 | aat18tat | gaa23gta | gat53gct | gcg54tcg | ctg55ctt | gcg56tcg |
| | | gcg61acg | cat63tac | | | | |
| TetRrevAF1/7 | 374 | ggg96agg | ctc101atc | | | | |
| TetRrevAF1/8 | 375 | ggt24ggc | tac93aac | ctc101ttc | ggc102gac | | |
| TetRrevAF1/11 | 376 | tta14ata | gtc20gta | atc22ctc | cgt94cat | gca97gcg | gtg99gag |
| TetRrevAF2/5 | 377 | tta14cga | gag19gaa | gac95cac | ctc101ccc | | |
| TetRrevAD2/4 | 378 | ctt17ttt | aat18cgt | gat53aat | atc59atg | gcg61acg | |
| TetRrevAD2/6 | 379 | aat18tat | gga21gaa | gaa23aaa | | | |
| TetRrevAD2/12 | 380 | gaa23cac | gat53tat | gcg56gcc | gag58cag | atc59acc | |
| TetRrevAD2/13 | 381 | gag19gat | gtc20gaa | gaa23aaa | gtg57ctg | atc59aac | ttg60ttc |
| | | gcg61gct | | | | | |
| TetRrevAD2/2 | 382 | tta14ata | gga21aga | gcg56gtg | | | |
| TetRrevAF1/3 | 383 | ggt24ggg | gac95gcc | ggg96agg | | | |
| TetRrevAF1/4 | 384 | aat18aaa | gac95gtc | ggg96gtg | gca97gta | | |
| TetRrevAF1/5 | 385 | tta14gta | ggt24ggc | tac93gac | cgt94ggt | gac95ggc | |
| TetRrevAD3/2 | 386 | gcg56ccg | gag58cat | gcg61gct | cat63tac | | |
| TetRrevAD3/3 | 387 | gga21--- | atc22--- | gaa23--- | ggt24agt | | |
| TetRrevAF2/7 | 388 | tac93tgc | gac95gaa | gca97aca | | | |
| TetRrevAF6/12 | 389 | tta14ttt | gag15gaa | ggg96gtg | aaa98gaa | gtg99cta | ctc101ccc |
| TetRrevAF7/1 | 390 | tac93tgc | ggg96cgg | aaa98aat | | | |
| TetRrevAF7/2 | 391 | tta14gta | gag15gtg | gaa23gat | aag48aaa | ggg96ctg | ggc102gcc |
| TetRrevAD3/5 | 392 | ctt17cta | aat18aag | gag19gtg | atc22acc | gat53tat | gcg54tcg |
| TetRrevAD3/6 | 393 | gtc20ggc | gcg56ccg | atc59ctc | cgt62cgc | | |
| TetRrevAD3/7 | 394 | ctt17atg | gag19gat | ctg52cta | gat53tac | gcg54gct | gcg56gag |
| TetRrevAD3/8 | 395 | ctg16ctt | gcg56gct | gtg57gag | gag58tta | atc59aac | ttg60gct |
| TetRrevAF2/14 | 396 | tta14ttg | gag15gcg | ctg16ttg | ctt17gtt | aat18aac | gtc20gtt |
| | | ggg96gta | | | | | |
| TetRrevAF2/15 | 397 | gtc20ggc | atc22aac | cgg49cag | gcc50acc | | |
| TetRrevAF2/16 | 398 | gag19gtg | tac93tgc | gac95tac | gca97aca | aaa98aac | gtg99ctg |
| | | ctc101ctg | | | | | |
| TetRrevAF3/5 | 399 | gtc20ttc | gga21aga | cgg49agt | | | |
| TetRrevAD3/9 | 400 | gag15cag | ctt17ctc | ctg55atg | atc59agg | | |
| TetRrevAD3/10 | 401 | aat18tat | ggt24ggc | cta51ctc | gat53tac | gcg54gtg | |
| TetRrevAD3/11 | 402 | tta14gta | ggt24ggc | tac93gac | cgt94ggt | gac95ggc | |
| TetRrevAF3/6 | 403 | gaa23aaa | gac95cac | ctc101cac | | | |
| TetRrevAF3/7 | 404 | ctt17cat | atc22ttc | gca97cca | | | |
| TetRrevAF3/8 | 405 | gag15gtg | ctg16ctc | aat18cat | gag19gat | gtc20gac | cgt94ccc |
| | | gac95cac | cac100aac | | | | |
| TetRrevAF3/10 | 406 | ggg96ggt | gtg99ggg | cac100ccc | | | |
| TetRrevAF4/1 | 407 | gag15gtg | gtc20gcc | atc22ttc | gaa23cag | tta25ttg | gca96gta |
| | | aaa98gaa | ggc102gga | | | | |
| TetRrevAF4/3 | 408 | ctg16cag | aat18cat | gag19gtg | gtc20ggt | atc22ata | ggg96acg |
| TetRrevAF4/4 | 409 | ggt24gca | cgt94cct | gac95gaa | ggc102gac | | |
| TetRrevAF4/5 | 410 | gag15ggg | ctg16ttg | gac95gcc | gtg99ggg | | |
| TetRrevAF4/6 | 411 | gag15gac | ctt17ata | aat18act | gaa23gga | gcg54gtg | gac95gcc |
| TetRrevAF4/7 | 412 | tta14gta | gca97aca | gtg99ggg | | | |
| TetRrevAF4/8 | 413 | tta14ttc | gaa23gca | ggg96atg | gca97cca | ctc101ccc | |
| TetRrevAF4/9 | 414 | ctg16cgg | gag19gat | gaa23gat | gac95ggc | gtg99gcg | ggc102ggg |
| TetRrevAD2/5 | 415 | ctt17ttt | ctg55ctt | ttg60ttc | cgt62gtg | | |
| TetRrevAD2/8 | 416 | gtc20gga | gat53aat | gcg54gca | gcg56ggg | gtg57ctg | atc59ttc |
| | | ttg60ttc | cgt62cga | | | | |
| TetRrevAD2/1 | 417 | gga21ggg | cta51ctc | gat53tat | ctg55cta | gcg56ccg | gcg61gag |
| TetRrevAF5/10 | 418 | cgt94cct | gg96gtg | gca97aca | aaa98aac | cac100cag | |
| TetRrevAF4/12 | 419 | ctg16cag | aat18tat | gca97gga | cac100tcc | | |
| TetRrevAF4/13 | 420 | gca13gcc | gag15gat | ctt17ctg | gag19gtg | atc22ata | gaa23aaa |
| | | cgt94cat | gac95aac | | | | |
| TetRrevAF5/1 | 421 | tta14ttt | gac95gcc | gtg99ggg | | | |
| TetRrevAF5/3 | 422 | gag15ggg | aat18aag | cgt94cat | ggg96ggc | ggc102gtc | |
| TetRrevAF5/5 | 423 | tta14gta | ctt17ttt | gtg20gcc | atc22atg | tta25ttt | gac95cac |
| TetRrevAF5/6 | 424 | aat18cat | tta25ttt | gca97cca | aaa98aac | ctc101cac | |
| TetRrevAF5/7 | 425 | gag15gcg | ggg96atg | gca97cca | ctc101ccc | | |
| TetRrevAF5/8 | 426 | atc22ata | cgt94cct | gtg99gag | | | |
| TetRrevAF5/9 | 427 | cgt94tgt | gtg99gag | | | | |
| TetRrevAF5/11 | 428 | aat18aag | gag19gcg | ctc101cta | ggc102agc | | |
| TetRrevAF5/13 | 429 | tta14cta | gtc20ggc | gtg99gag | | | |
| TetRrevAF6/1 | 430 | gca13gcg | gag19gtg | gtc20gcc | gac95atc | ggg96gga | |
| TetRrevAF6/2 | 431 | aat18gat | gaa23gca | gac95aac | cac100ccc | ctc101tcc | |
| TetRrevAF6/3 | 432 | ggg96ggt | gtg99ggg | cac100ccc | | | |
| TetRrevAF6/4 | 433 | tac93tat | ggg96cgg | gca97cca | | | |
| TetRrevAF6/5 | 434 | gtc20gta | atc22gtc | gaa23gat | gac95aac | cac100ccc | |
| TetRrevAF6/6 | 435 | gac95tac | ggg96gag | gtg99gtc | | | |
| TetRrevAF6/7 | 436 | ggg96ggt | gtg99ggg | cac100ccc | | | |
| TetRrevAF6/8 | 437 | gcg71acg | ggg96gag | | | | |
| TetRrev96/99-1 | 438 | ggg96cac | gtg99agg | | | | |
| TetRrev96/99-2 | 439 | ggg96aag | gtg99gcc | | | | |
| TetRrev96/99-3 | 440 | ggg96gag | gtg99acc | | | | |
| TetRrev96/99-4 | 441 | ggg96ccc | gtg99tcg | | | | |
| TetRrev96/99-5 | 442 | ggg96atc | gtg99aag | | | | |
| TetRrev96/99-6 | 443 | ggg96aac | gtg99cag | | | | |
| TetRrev96/99-7 | 444 | ggg96ctg | gtg99aag | | | | |
| TetRrev96/99-8 | 445 | ggg96aac | gtg99cac | | | | |
| TetRrev96/99-9 | 446 | ggg96cac | gtg99aac | | | | |
| TetRrev96/99-10 | 447 | ggg96aac | gtg99ccg | | | | |
| TetRrev96/99-11 | 448 | ggg96agg | gtg99tac | | | | |
| TetRrev96/99-12 | 449 | ggg96cac | gtg99cag | | | | |
| TetRrev96/99-13 | 450 | ggg96acc | gtg99gac | | | | |
| TetRrev96/99-14 | 451 | ggg96aac | gtg99aac | | | | |
| TetRrev96/99-15 | 452 | ggg96ccg | gtg99ccc | | | | |
| TetRrev96/99-16 | 453 | ggg96ccc | gtg99tac | | | | |
| TetRrev96/99-17 | 454 | ggg96acc | gtg99aag | | | | |
| TetRrev96/99-18 | 455 | ggg96acc | gtg99ccc | | | | |
| TetRrev96/99-19 | 456 | ggg96cgt | gtg99tcg | | | | |
| TetRrev96/99-20 | 457 | ggg96tcc | gtg99aag | | | | |
| TetRrev96P | 458 | ggg96ccc | | | | | |

[0092] In one specific embodiment, modified revTetR repressors of the present invention comprise an amino acid substitution of arginine for glycine at position 96 (e.g., SEQ ID NO. 24). Additional modified revTetR repressors of the present invention comprise the arginine for glycine substitution at position 96 and further comprise a substitution or substitutions of serine for threonine at position 103 and valine for glutamic acid at position 114 (e.g., SEQ ID NO. 2); leucine for proline at position 159 (e.g., SEQ ID NO. 6); glutamine to histidine at position 188 (e.g., SEQ ID NO. 12). Interestingly, as described below, each of the revTetR repressor has a different activity compared to the others demonstrating that each substitution or combination of substitutions contributes to or modulates the activity of the resulting revTetR repressor protein and that the activity is not solely derived from the single arginine substitution at position 96 (e.g., see FIG. 2).

[0093] In another embodiment, modified revTetR repressors of the present invention comprise an amino acid substitution of glutamic acid for glycine at position 96 and further comprise a substitution or substitutions of aspargine for aspartic acid at position 157 and histidine for glutamine at position 200 (e.g., SEQ ID NO. 4); serine for leucine at position 205 (e.g., SEQ ID NO. 14); or phenylalanine for tryptophan at position 110 (e.g., SEQ ID NO. 16). Similar to the G96R substitutions above, each of the revTetR proteins has a different activity compared to each other demonstrating that each substitution or combination of substitutions contributes to or modulates the activity of the resulting revTetR repressor protein and that the observed activity is not solely derived from the single glutamic acid substitution at position 96 (e.g., see FIG. 2).

[0094] In yet another embodiment, modified revTetR repressors of the present invention comprise an amino acid substitution of glutamic acid for valine at position 99 (SEQ ID NO. 26). Additional modified revTetR repressors of the present invention comprise glutamic acid for valine at position 99 and further comprise a substitution or substitutions of valine for isoleucine at position 194 (e.g., SEQ ID NO. 18); cysteine for arginine at position 158 (e.g., SEQ ID NO. 20); or valine for alanine at position 70 and glutamine for leucine at position 91 (e.g., SEQ ID NO. 22). Similarly to the G96R and G96E class of revTetR repressors, each of the V99E-substituted revTetR protein has a different activity compared to each other demonstrating that each substitution or combination of substitutions contributes to or modulates the activity of the resulting revTetR repressor protein and that the observed activity is not solely derived from the single valine substitution at position 99 (e.g., see FIG. 2).

[0095] Furthermore, modified revTetR repressors of the present invention comprise an amino acid substitution of asparagine for isoleucine for position 59, glutamic acid for aspartic acid at position 95, and alanine for histidine at position 100 (e.g., SEQ ID NO. 10); asparagine for leucine at position 59, arginine for lysine at position 98, histidine for leucine at position 101 and glycine for serine at position 192 (e.g., SEQ ID NO. 30); valine for alanine at position 160, valine for aspartic acid at position 178, tryptophan for glycine at position 196 (e.g., SEQ ID NO. 8); and, valine for alanine at position 71, glycine (GGC) for aspartic acid at position 95, and arginine for leucine at position 127 (e.g., SEQ ID NO. 28).

[0096] In other preferred embodiments, the purified revTetR repressors of the present invention comprise any of the amino acid sequences set forth in SEQ ID NOS. 2, 4, 6, 8, 10, 12, 14, 16, 18, 20, 22, 24, 26, 28, 30, and 71-264.

[0097] In addition, the methods and compositions of the invention also use and encompass proteins and polypeptides that represent functionally equivalent gene products. Such functionally equivalent gene products include, but are not limited to, natural variants of the polypeptides having an amino acid sequence set forth in SEQ ID NO: 2, 4, 6, 8, 10, 12, 14, 16, 18, 20, 22, 24, 26, 28, 30, and 71-264. Such equivalent revTetR repressors can contain, e.g., deletions, additions or substitutions of amino acid residues within the amino acid sequences encoded by the target gene sequences described above, but which result in a silent change, thus producing a functionally equivalent revTetR repressor product. As described above, nucleotide substitutions in the coding region of revTetR repressors that did not result in a corresponding codon change were identified using the cell-based assay in Section 5.5.2.

[0098] Amino acid substitutions can be made on the basis of similarity in polarity, charge, solubility, hydrophobicity, hydrophilicity size, nucleophilicity, and/or the amphipathic nature of the residues involved. Examples of such classifications, some of which overlap include, nonpolar (i.e., hydrophobic) amino acid residues can include alanine (Ala or A), leucine (Leu or L), isoleucine (Ile or I), valine (Val or V), proline (Pro or P), phenylalanine (Phe or F), tryptophan (Trp or W) and methionine (Met or M); polar neutral amino acid residues can include glycine (Gly or G), serine (Ser or S), threonine (Thr or T), cysteine (Cys or C), tyrosine (Tyr or Y), asparagine (Asn or N) and glutamine (Gln or Q); small amino acids include glycine (Gly or G), and alanine (Ala or A); hydrophobic amino acid residues can include valine (Val or V), leucine (Leu or L), isoleucine (Ile or I), methionine (Met or M), and proline (Pro or P); nucleophilic amino acids can include serine (Ser or S), threonine (Thr or T), and cysteine (Cys or C); aromatic amino acids can include phenylalanine (Phe or F), tyrosine (Tyr or Y), and tryptophan (Trp or W); amide amino acids can include asparagine (Asn or N), and glutamine (Gln or Q); positively charged (i.e., basic) amino acid residues can include arginine (Arg or R), lysine (Lys or K) and histidine (His or H); and negatively charged (i.e., acidic) amino acid residues can include aspartic acid (Asp or D) and glutamic acid (Glu or E). Thus, other amino acid substitutions, deletions or additions at these or other amino acid positions that retain the desired functional properties of the revTetR repressors are within the scope of the invention.

[0099] 5.2.3 Modified Repressors of Other Classes

[0100] In a further embodiment of the present invention, a non-chimeric Tet repressor selected from the TetR(A), TetR(B), TetR(C), TetR(D), TetR(E), TetR(G), TetR(H), TetR(J), and TetR(Z) classes of TetR repressor proteins, is expressed from a mutated coding sequence encoding one or more of amino acid substitutions to provide a modified TetR protein which binds to DNA with greater affinity in the presence of tetracycline or a tetracycline analog than in the absence of tetracycline or tetracycline analog, i.e. a revTet repressor.

[0101] In certain embodiments, a TetR protein of the present invention is a non-chimeric TetR repressor protein selected from the TetR(A), TetR(B), TetR(C), TetR(D), TetR(E), TetR(G), TetR(H), TetR(J), and TetR(Z) classes of TetR repressor proteins and which comprises at least one amino acid substitution at a position corresponding to the following amino acid position and/or positions of the tetR(BD) chimera depicted in SEQ ID NO: 32, position 96 or 99; positions 96, 103 and 114; positions 96, 157 and 200; positions 96 and 159; positions 160, 178, 196; positions 59, 95 and 100; positions 96 and 188; positions 96 and,205; positions 96 and 110; positions 99 and 194; positions 99 and 158; positions 70, 91 and 99; positions 71, 95 and 127; positions 59, 98, 101 and 192.

[0102] In certain embodiments, the amino acid substitutions at these positions (with respect to the amino acid sequence depicted in SEQ ID NO: 32) that confer a reverse phenotype in prokaryotes include, but are not limited to, Asn at position 59, Val at positions 70 and 71; Gln at position 91; Glu and Gly at position 95; Arg and Glu at position 96; Arg at position 98; Glu at position 99; Ala at position 100; His at position 101; Ser at position 103; Phe at position 110; Val at position 114; Arg at position 127; Asn at position 157; Cys at position 158; Leu at position 159; Gln at position 188; Gly at position 192; Val at position 194; Trp at position 196; His at position 200; and Ser at position 205.

[0103] In specific embodiments, a TetR protein selected from any of the TetR(A), TetR(B), TetR(C), TetR(D), TetR(E), TetR(G), TetR(H), TetR(J), and TetR(Z) classes of TetR repressor proteins, is modified to provide a revTetR repressor of the present invention that comprises arginine at the amino acid corresponding to the amino acid at position 96 of SEQ ID NO: 32.

[0104] In other specific embodiments, a TetR protein selected from any of the TetR(A), TetR(B), TetR(C), TetR(D), TetR(E), TetR(G), TetR(H), TetR(J), and TetR(Z) classes of TetR repressor proteins, is modified to provide a revTetR repressor of the present invention that comprises a glycine residue at the amino acid position corresponding to amino acid position 96 of SEQ ID NO: 32, and/or comprises serine at position 103, valine at position 114; leucine at position 159; and glutamine at position 188, where each amino acid position corresponds to the amino acid position of the protein sequence depicted in SEQ ID NO: 32.

[0105] In another embodiment, a TetR repressor protein selected from the TetR(A), TetR(B), TetR(C), TetR(D), TetR(E), TetR(G), TetR(H), TetR(J), and TetR(Z) classes of TetR repressor proteins is modified to provide a revTetR repressor of the present invention that comprises glutamic acid at position 96 and further at position 157 and histidine at position 200; serine at position 205; or phenylalanine at position 110, where each amino acid position corresponds to the amino acid position of the protein sequence depicted in SEQ ID NO: 32.

[0106] In yet another embodiment, a TetR repressor protein selected from the TetR(A), TetR(B), TetR(C), TetR(D), TetR(E), TetR(G), TetR(H), TetR(J), and TetR(Z) classes of TetR repressor proteins is modified to provide a modified revTetR repressor of the present invention that comprises glutamic acid at position 99; glutamic acid at position 99 and valine at position 194; cysteine at position 158; valine at position 70 and glutamine at position 91; asparagine at position 59, glutamic acid at position 95, and alanine at position 100; asparagine at position 59, arginine at position 98, histidine at position 101 and glycine at position 192; valine at position 160, valine at position 178, tryptophan at position 196; and, valine at position 71, glycine at position 95, and arginine at position 127; where each amino acid position corresponds to the amino acid position of the protein sequence depicted in SEQ ID NO: 32.

[0107] Such non-chimeric revTetR repressor proteins of the present invention constructed from any TetR repressor protein of the TetR(A), TetR(B), TetR(C), TetR(D), TetR(E), TetR(G), TetR(H), TetR(J), and TetR(Z) classes, also, therefore include all members of these classes of TetR proteins and is not to be limited to the specific, exemplary proteins provided in SEQ ID NO: 34, 36, 38, 40, 42, 44, 46, 48, 50 that correspond, respectively to the nine TetR classes provided, and are encoded, respectively by the nucleotide sequence provided in SEQ ID NO: 33, 35, 37, 39, 41, 43, 45, 47, and 49. Moreover, the revTetR repressor proteins of the present invention constructed from any TetR repressor of classes A, B, C, D, E, G, H, J, and Z, also encompass proteins and polypeptides that represent functionally equivalent gene products, including, but not limited to, natural variants of these polypeptides having an amino acid sequence set forth in SEQ ID NO: 32, 34, 36, 38, 40, 42, 44, 46, 48, and 50. Such equivalent revTetR repressors can also contain, e.g., deletions, additions or substitutions of amino acid residues within the amino acid sequences encoded by the target gene sequences described above, but which result in a silent change, thus producing a functionally equivalent revTetR repressor product.

[0108] For example, amino acid substitutions can be made on the basis of similarity in polarity, charge, solubility, hydrophobicity, hydrophilicity size, nucleophilicity, and/or the amphipathic nature of the residues involved. Examples of such classifications, some of which overlap include, nonpolar (i.e., hydrophobic) amino acid residues can include alanine (Ala or A), leucine (Leu or L), isoleucine (Ile or I), valine (Val or V), proline (Pro or P), phenylalanine (Phe or F), tryptophan (Trp or W) and methionine (Met or M); polar neutral amino acid residues can include glycine (Gly or G), serine (Ser or S), threonine (Thr or T), cysteine (Cys or C), tyrosine (Tyr or Y), asparagine (Asn or N) and glutamine (Gln or Q); small amino acids include glycine (Gly or G), and alanine (Ala or A); hydrophobic amino acid residues can include valine (Val or V), leucine (Leu or L), isoleucine (Ile or I), methionine (Met or M), and proline (Pro or P); nucleophilic amino acids can include serine (Ser or S), threonine (Thr or T), and cysteine (Cys or C); aromatic amino acids can include phenylalanine (Phe or F), tyrosine (Tyr or Y), and tryptophan (Trp or W); amide amino acids can include asparagine (Asn or N), and glutamine (Gln or Q); positively charged (i.e., basic) amino acid residues can include arginine (Arg or R), lysine (Lys or K) and histidine (His or H); and negatively charged (i.e., acidic) amino acid residues can include aspartic acid (Asp or D) and glutamic acid (Glu or E). Thus, other amino acid substitutions, deletions or additions at these or other amino acid positions that retain the desired functional properties of the revTetR repressors are within the scope of the invention.

[0109] In other embodiments of the present invention, the specific amino acid substitutions identified as described herein with TetR(BD) chimeras, may also, in turn, be substituted by similar, functionally equivalent amino acids, i.e. those indicated in the preceding paragraph, to provide additional revTetR repressors that are within the scope of the invention. That is, a revTetR repressor protein of the present invention can be constructed from any TetR repressor protein of the TetR(A), TetR(B), TetR(C), TetR(D), TetR(E), TetR(G), TetR(H), TetR(J), and TetR(Z) classes by substituting, at the position corresponding to that identified in the TetR(BD) chimera depicted in SEQ ID NO: 32, either the exact amino acid identified in the revTet(BD) chimeras depicted in SEQ ID NO: 2, 4, 6, 8, 10, 12, 14, 16, 18, 20, 22, 24, 26, 28, 30, and 71-264, or, in certain embodiments, the functional equivalent of that amino acid.

[0110] The amino acid substitutions of the present invention and their functional equivalents can be introduced into TetR proteins of each of the nine classes of TetR proteins, to provide novel revTet repressor proteins. The position of each of the amino acid substitutions disclosed above is numbered according to the amino acid sequence of the TetR(BD) chimeric protein of SEQ ID NO: 32. As would be apparent to one of ordinary skill, the corresponding amino acid to be substituted in another TetR protein such as, but not limited to those members of the TetR(A), TetR(B), TetR(C), TetR(D), TetR(E), TetR(G), TetR(H), TetR(J), and TetR(Z) classes of TetR repressor proteins to provide a revTetR protein, is readily identified using methods and tools well known in the art. For example, the amino acid sequence of a subject TetR repressor is readily compared with that provided by SEQ ID NO: 32 using software publically available from the National Center for Biotechnology Information and the National Library of Medicine at http://www.ncbi.nlm.nih.gov/BLAST. (For a description of this software, see Tatusova et al. (1999) FEMS Microbiol Lett 177(1): 187-88).

[0111] For example, comparisons have been carried out for each representative TetR(A), TetR(B), TetR(C), TetR(D), TetR(E), TetR(G), TetR(H), TetR(J), and TetR(Z) protein disclosed above, to provide the position and nature of the amino acid corresponding to each of the substitutions disclosed herein, for each representative class member. The results of such comparisons are summarized in Table 3, where TetR(BD) is SEQ ID NO: 32, TetR(A) is SEQ ID NO: 34, TetR(B) is SEQ ID NO: 36, TetR(C) is SEQ ID NO: 38, TetR(D) is SEQ ID NO: 40, TetR(E) is SEQ ID NO: 42, TetR(G) is SEQ ID NO: 44, TetR(H) is SEQ ID NO: 46, TetR(J) is SEQ ID NO: 48, and TetR(Z) is SEQ ID NO: 50. The first column of Table 3 provides the wild type amino acid residue, the amino acid position number, and the substituted amino acid residue found at that position in the revTet(BD) mutants disclosed above. The corresponding amino acid position and wild type amino acid residue for each representative member of TetR A, B, C, D, E, G, H, J, and Z are provided in the remaining nine columns of Table 3.

TABLE 3

| TetR(BD) | | | | | | | | | |
|---|---|---|---|---|---|---|---|---|---|
| revTet | TetR | TetR | TetR | TetR | TetR | TetR | TetR | TetR | TetR |
| allele | (A) | (B) | (C) | (D) | (E) | (G) | (H) | (J) | (Z) |
| I 59 N | M 59 | M 59 | M 59 | I 59 | I 59 | M 59 | I 59 | I 59 | V 63 |
| A 70 V | R 70 | L 70 | P 70 | A 70 | L 70 | E 70 | L 70 | L 70 | E 74 |
| A 71 V | A 71 | E 71 | D 71 | A 71 | P 71 | E 71 | P 71 | A 71 | S 75 |
| L 91 Q | L 91 | L 91 | L 91 | L 91 | L 91 | L 91 | L 91 | L 91 | H 95 |
| D 95 E | D 95 | D 95 | D 95 | D 95 | D 95 | D 95 | D 95 | D 95 | D 99 |
| D 95 G | | | | | | | | | |
| G 96 R | G 96 | G 96 | G 96 | G 96 | G 96 | G 96 | G 96 | G 96 | G 100 |
| G 96 E | | | | | | | | | |
| K 98 R | R 98 | K 98 | R 98 | K 98 | R 98 | R 98 | K 98 | K 98 | R 102 |
| V 99 E | I 99 | V 99 | I 99 | V 99 | L 99 | I 99 | I 99 | I 99 | L 103 |
| H 100 A | H 100 | H 100 | H 100 | H 100 | H 100 | H 100 | H 100 | H 100 | H 104 |
| L 101 H | A 101 | L 101 | A 101 | L 101 | I 101 | A 101 | A 101 | A 101 | A 105 |
| T 103 S | T 103 | T 103 | T 103 | T 103 | T 103 | T 103 | T 103 | T 103 | H 107 |
| Y 110 F | M 110 | Y 110 | M 110 | Y 110 | F 110 | F 110 | F 110 | F 110 | D 114 |
| E 114 V | D 114 | E 114 | D 114 | E 114 | E 114 | E 114 | E 114 | E 114 | E 118 |
| L 127 R | A 127 | L 127 | A 127 | L 127 | V 127 | P 127 | L 127 | L 127 | E 137 |
| D 157 N | E 157 | E 157 | E 157 | D 157 | N 157 | D 159 | E 157 | E 157 | G 164 |
| R 158 C | R 158 | R 158 | R 158 | R 158 | H 158 | R 160 | R 158 | R 158 | N 165 |
| P 159 L | G 159 | E 159 | G 159 | P 159 | V 159 | P 161 | E 159 | E 159 | A 166 |
| A 160 V | G 160 | T 160 | T 164 | A 160 | I 160 | D 162 | K 160 | K 160 | S 167 |
| D 178 V | D 179 | D 178 | Y 182 | D 178 | A 175 | E 180 | D 180 | D 180 | — |
| H 188 Q | Q 189 | F 188 | R 192 | H 188 | F 185 | F 190 | F 190 | F 190 | F 177 |
| S 192 G | V 193 | L 192 | L 196 | S 192 | S 189 | S 194 | V 194 | V 194 | A 181 |
| I 194 V | V 195 | I 194 | I 198 | I 194 | I 191 | I 196 | I 196 | I 196 | I 183 |
| G 196 W | G 197 | G 196 | G 200 | G 196 | G 193 | G 198 | G 198 | G 198 | G 185 |
| Q 200 H | R 201 | Q 200 | M 204 | Q 200 | Q 197 | L 202 | V 202 | V 202 | S 189 |
| L 205 S | N 206 | S 205 | N 209 | L 205 | K 202 | L 207 | K 207 | H 207 | L 194 |

[0112] In light of the demonstrated sequence conservation between and among the TetR repressor proteins previously characterized, such an analysis can be performed with any TetR repressor protein including, but not limited to, other known members of these nine classes of TetR proteins. For instance, based on the information provided in Table 3, one of skill in the art can introduce the same substitution or substitutions as provided for TetR(BD) into any one of the listed TetR repressor class for the amino acid positions 91, 95, 96, 100, 103 and 196.

[0113] Furthermore, the amino acid substitution identified at position 114 involved in the reverse phenotype was valine for glutamic acid. While glutamic acid is present in TetR classes B and E, the amino acid at position 114 in TetR classes A and C is an aspartic acid, also a negatively charged amino acid residue. Therefore, replacement of the aspartic acid codon with a codon for a hydrophobic amino acid, such as valine, would be predicted to have similar functional result in these classes. Similar substitutions may be introduced at other positions to generate isolated nucleic acids of the present invention.

[0114] Therefore, once the corresponding amino acid(s) have been identified, they, or their functional equivalents can be introduced into another TetR protein, or tetracycline-binding domain thereof, of each of the nine classes of TetR proteins, to provide a novel revTet repressor protein, using recombinant DNA techniques that are disclosed below and that are well known in the art. Accordingly, in another embodiment, the present invention is directed toward chimeric tetracycline repressor proteins that comprise, for example, a tetracycline-binding domain derived from a revTetR protein of any of the TetR(A), TetR(B), TetR(C), TetR(D), TetR(E), TetR(G), TetR(H), TetR(J), and TetR(Z) classes of TetR binding proteins as disclosed above, that is operatively associated with a DNA-binding domain, which may be derived from another TetR repressor protein or from a non-TetR repressor, DNA-binding protein. In this embodiment, the tetracycline-binding domain carries one or more of the amino acid substitutions disclosed above such that the modified chimeric revTetR protein binds to DNA with greater affinity in the presence of tetracycline or a tetracycline analog than it does in the absence of tetracycline or a tetracycline analog.

[0115] As used herein, the term “DNA-binding domain” generally encompasses, for example, approximately the first 50 amino-terminal residues of each TetR protein, which includes the helix-turn-helix structural motif known to be involved in the DNA recognition and binding.

[0116] As used herein, the term “tetracycline-binding domain” is generally intended to encompass that portion of a TetR protein other than the amino-terminal DNA-binding domain, and therefore, includes not only the tetracycline-binding portion but also those portions of the Tet repressor molecule that may be required for dimer formation. In other aspects of this embodiment, the tetracycline-binding domain of a chimeric revTetR protein comprises the carboxy terminal part of the polypeptide.

[0117] In certain embodiments, the chimeric revTetR proteins of the present invention consist essentially of from about 180 to about 230 amino acids, from about 185 to about 225 amino acids, from about 190 amino acids to about 220 amino acids, and from about 195 amino acids to about 215 amino acids.

[0118] In one embodiment, the present invention is directed toward a modified TetR(A) protein comprising an amino acid substitution at a position selected from the group consisting of positions 59, 70, 71, 91, 95, 96, 99, 100, 101, 103, 114, 127, 158, 159, 160, 179, 193, 197, and 201 of the TetR(A) protein as depicted in SEQ ID NO: 34, wherein said modified TetR(A) protein binds a TetR(A) operator sequence with greater affinity in the presence of tetracycline than in the absence of tetracycline. In particular aspects of this embodiment: the amino acid substitution at position 59 is selected from the group consisting of glycine, serine, threonine, cysteine, tyrosine, asparagine and glutamine; the amino acid substitution at position 70 is selected from the group consisting of isoleucine, valine, phenylalanine, methionine, and tryptophan; the amino acid substitution at position 71 is selected from the group consisting of leucine, isoleucine, valine, phenylalanine, methionine, and tryptophan; the amino acid substitution at position 91 is selected from the group consisting of glycine, serine, threonine, cysteine, tyrosine, asparagine, and glutamine; the amino acid substitution at position 95 is selected from the group consisting of glycine, serine, threonine, cysteine, tyrosine, asparagine, glutamine, alanine, and glutamic acid; the amino acid substitution at position 96 is selected from the group consisting of aspartic acid, glutamic acid, arginine, lysine, and histidine; the amino acid substitution at position 99 is selected from the group consisting of aspartic acid, and glutamic acid; the amino acid substitution at position 100 is selected from the group consisting of alanine, leucine, isoleucine, valine, proline, phenylalanine, tryptophan, and methionine; the amino acid substitution at position 101 is selected from the group consisting of arginine, lysine, and histidine; the amino acid substitution at position 103 is selected from the group consisting of glycine, serine, cysteine, tyrosine, asparagine, and glutamine; the amino acid substitution at position 114 is selected from the group consisting of alanine, leucine, isoleucine, valine, proline, phenylalanine, tryptophan, and methionine; the amino acid substitution at position 127 is selected from the group consisting of arginine, lysine, and histidine; the amino acid substitution at position 158 is selected from the group consisting of glycine, serine, threonine, cysteine, tyrosine, and glutamine; the amino acid substitution at position 159 is selected from the group consisting of methionine, leucine, isoleucine, phenylalanine, and tryptophan; the amino acid substitution at position 160 is selected from the group consisting of methionine, leucine, valine, proline, phenylalanine, and tryptophan; the amino acid substitution at position 179 is selected from the group consisting of methionine, leucine, isoleucine, valine, proline, phenylalanine, and tryptophan; the amino acid substitution at position 193 is selected from the group consisting of glycine, threonine, cysteine, tyrosine, asparagine, and glutamine; the amino acid substitution at position 197 is selected from the group consisting of alanine, leucine, isoleucine, valine, proline, phenylalanine, tryptophan, and tyrosine; and the amino acid substitution at position 201 is selected from the group consisting of arginine, lysine, and histidine.

[0119] In another embodiment, the present invention is directed toward a modified TetR(A) protein comprising an amino acid substitution at a position selected from the group consisting of positions 59, 70, 71, 91, 95, 96, 99, 100, 101, 103, 114, 127, 158, 159, 160, 179, 193, 197, and 201 of the TetR(A) protein as depicted in SEQ ID NO: 34, wherein said modified TetR(A) protein binds a TetR(A) operator sequence with greater affinity in the presence of tetracycline than in the absence of tetracycline; wherein: the amino acid substitution at position 59 is asparagine; the amino acid substitution at position 70 is valine; the amino acid substitution at position 71 is valine; the amino acid substitution at position 91 is glutamine; the amino acid substitution at position 95 is selected from the group consisting of glycine and glutamic acid; the amino acid substitution at position 95 is glycine; the amino acid substitution at position 95 is glutamic acid; the amino acid substitution at position 96 is arginine; the amino acid substitution at position 96 is glutamic acid; the amino acid substitution at position 99 is glutamic acid; the amino acid substitution at position 100 is alanine; the amino acid substitution at position 101 is histidine; the amino acid substitution at position 103 is serine; the amino acid substitution at position 114 is valine; the amino acid substitution at position 127 is selected from the group consisting of arginine, lysine, and histidine; the amino acid substitution at position 158 is cysteine; the amino acid substitution at position 159 is leucine; the amino acid substitution at position 160 is valine; the amino acid substitution at position 179 is valine; the amino acid substitution at position 193 is glycine; the amino acid substitution at position 197 is tryptophan; and the amino acid substitution at position 201 is histidine. In further embodiments, the present invention is directed toward modified TetR(A) proteins that comprise the single or multiple amino acid substitutions at positions of the TetR(A) protein that correspond to those identified in the revTetR(BD) chimeras of Table 1.

[0120] In another embodiment, the present invention is directed toward a modified TetR(B) protein comprising an amino acid substitution at a position selected from the group consisting of positions 59, 70, 71, 91, 95, 96, 99, 100, 101, 103, 114, 127, 158, 159, 160, 178, 192, 196, and 200 of the TetR(B) protein as depicted in SEQ ID NO: 36, wherein said modified TetR(B) protein binds a TetR(B) operator sequence with greater affinity in the presence of tetracycline than in the absence of tetracycline. In particular aspects of this embodiment: the amino acid substitution at position 59 is selected from the group consisting of glycine, serine, threonine, cysteine, tyrosine, asparagine and glutamine; the amino acid substitution at position 70 is selected from the group consisting of isoleucine, valine, phenylalanine, methionine, and tryptophan; the amino acid substitution at position 71 is selected from the group consisting of leucine, isoleucine, valine, phenylalanine, methionine, and tryptophan; the amino acid substitution at position 91 is selected from the group consisting of glycine, serine, threonine, cysteine, tyrosine, asparagine, and glutamine; the amino acid substitution at position 95 is selected from the group consisting of glycine, serine, threonine, cysteine, tyrosine, asparagine, glutamine, alanine, and glutamic acid; the amino acid substitution at position 96 is selected from the group consisting of aspartic acid, glutamic acid, arginine, lysine, and histidine; the amino acid substitution at position 99 is selected from the group consisting of aspartic acid, and glutamic acid; the amino acid substitution at position 100 is selected from the group consisting of alanine, leucine, isoleucine, valine, proline, phenylalanine, tryptophan, and methionine; the amino acid substitution at position 101 is selected from the group consisting of arginine, lysine, and histidine; the amino acid substitution at position 103 is selected from the group consisting of glycine, serine, cysteine, tyrosine, asparagine, and glutamine; the amino acid substitution at position 114 is selected from the group:consisting of alanine, leucine, isoleucine, valine, proline, phenylalanine, tryptophan, and methionine; the amino acid substitution at position 127 is selected from the group consisting of arginine, lysine, and histidine; the amino acid substitution at position 158 is selected from the group consisting of glycine, serine, threonine, cysteine, tyrosine, and glutamine; the amino acid substitution at position 159 is selected from the group consisting of methionine, leucine, isoleucine, phenylalanine, and tryptophan; the amino acid substitution at position 160 is selected from the group consisting of methionine, leucine, valine, proline, phenylalanine, and tryptophan; the amino acid substitution at position 178 is selected from the group consisting of methionine, leucine, isoleucine, valine, proline, phenylalanine, and tryptophan; the amino acid substitution at position 192 is selected from the group consisting of glycine, threonine, cysteine, tyrosine, asparagine, and glutamine; the amino acid substitution at position 196 is selected from the group consisting of alanine, leucine, isoleucine, valine, proline, phenylalanine, tryptophan, and tyrosine; and the amino acid substitution at position 200 is selected from the group consisting of arginine, lysine, and histidine.

[0121] In another embodiment, the present invention is directed toward a modified TetR(B) protein comprising an amino acid substitution at a position selected from the group consisting of positions 59, 70, 71, 91, 95, 96, 99, 100, 101, 103, 114, 127, 158, 159, 160, 178, 192, 196, and 200 of the TetR(B) protein as depicted in SEQ ID NO: 36, wherein said modified TetR(B) protein binds a TetR(B) operator sequence with greater affinity in the presence of tetracycline than in the absence of tetracycline, wherein: the amino acid substitution at position 59 is asparagine; the amino acid substitution at position 70 is valine; the amino acid substitution at position 71 is valine; the amino acid substitution at position 91 is glutamine; the amino acid substitution at position 95 is selected from the group consisting of glycine and glutamic acid; the amino acid substitution at position 95 is glycine; the amino acid substitution at position 95 is glutamic acid; the amino acid substitution at position 96 is arginine; the amino acid substitution at position 96 is glutamic acid; the amino acid substitution at position 99 is glutamic acid; the amino acid substitution at position 100 is alanine; the amino acid substitution at position 101 is histidine; the amino acid substitution at position 103 is serine; the amino acid substitution at position 114 is valine; the amino acid substitution at position 127 is selected from the group consisting of arginine, lysine, and histidine; the amino acid substitution at position 158 is cysteine; the amino acid substitution at position 159 is leucine; the amino acid substitution at position 160 is valine; the amino acid substitution at position 178 is valine; the amino acid substitution at position 192 is glycine; the amino acid substitution at position 196 is tryptophan; and the amino acid substitution at position 200 is histidine. In further embodiments, the present invention is directed toward modified TetR(B) proteins that comprise the single or multiple amino acid substitutions at positions of the TetR(B) protein that correspond to those identified in the revTetR(BD) chimeras of Table 1.

[0122] In another embodiment of the present invention is directed toward a modified TetR(C) protein comprising an amino acid substitution at a position selected from the group consisting of positions 59, 70, 71, 91, 95, 96, 99, 100, 101, 103, 114, 127, 158, 159, 164, 182, 196, 200, and 204 of the TetR(C) protein as depicted in SEQ ID NO: 38, wherein said modified TetR(C) protein binds a TetR(C) operator sequence with greater affinity in the presence of tetracycline than in the absence of tetracycline. In particular aspects of this embodiment: the amino acid substitution at position 59 is selected from the group consisting of glycine, serine, threonine, cysteine, tyrosine, asparagine and glutamine; the amino acid substitution at position 70 is selected from the group consisting of isoleucine, valine, phenylalanine, methionine, and tryptophan; the amino acid substitution at position 71 is selected from the group consisting of leucine, isoleucine, valine, phenylalanine, methionine, and tryptophan; the amino acid substitution at position 91 is selected from the group consisting of glycine, serine, threonine, cysteine, tyrosine, asparagine, and glutamine; the amino acid substitution at position 95 is selected from the group consisting of glycine, serine, threonine, cysteine, tyrosine, asparagine, glutamine, alanine, and glutamic acid; the amino acid substitution at position 96 is selected from the group consisting of aspartic acid, glutamic acid, arginine, lysine, and histidine; the amino acid substitution at position 99 is selected from the group consisting of aspartic acid, and glutamic acid; the amino acid substitution at position 100 is selected from the group consisting of alanine, leucine, isoleucine, valine, proline, phenylalanine, tryptophan, and methionine; the amino acid substitution at position 101 is selected from the group consisting of arginine, lysine, and histidine; the amino acid substitution at position 103 is selected from the group consisting of glycine, serine, cysteine, tyrosine, asparagine, and glutamine; the amino acid substitution at position 114 is selected from the group consisting of alanine, leucine, isoleucine, valine, proline, phenylalanine, tryptophan, and methionine; the amino acid substitution at position 127 is selected from the group consisting of arginine, lysine, and histidine; the amino acid substitution at position 158 is selected from the group consisting of glycine, serine, threonine, cysteine, tyrosine, and glutamine; the amino acid substitution at position 159 is selected from the group consisting of methionine, leucine, isoleucine, phenylalanine, and tryptophan; the amino acid substitution at position 164 is selected from the group consisting of methionine, leucine, valine, proline, phenylalanine, and tryptophan; the amino acid substitution at position 182 is selected from the group consisting of methionine, leucine, isoleucine, valine, proline, phenylalanine, and tryptophan; the amino acid substitution at position 196 is selected from the group consisting of glycine, threonine, cysteine, tyrosine, asparagine, and glutamine; the amino acid substitution at position 200 is selected from the group consisting of alanine, leucine, isoleucine, valine, proline, phenylalanine, tryptophan, and tyrosine; and the amino acid substitution at position 201 is selected from the group consisting of arginine, lysine, and histidine.

[0123] In another embodiment, the present invention is directed toward a modified TetR(C) protein comprising an amino acid substitution at a position selected from the group consisting of positions 59, 70, 71, 91, 95, 96, 99, 100, 101, 103, 114, 127, 158, 159, 164, 182, 196, 200, and 204 of the TetR(C) protein as depicted in SEQ ID NO: 38, wherein said modified TetR(C) protein binds a TetR(C) operator sequence with greater affinity in the presence of tetracycline than in the absence of tetracycline, wherein: the amino acid substitution at position 59 is asparagine; the amino acid substitution at position 70 is valine; the amino acid substitution at position 71 is valine; the amino acid substitution at position 91 is glutamine; the amino acid substitution at position 95 is selected from the group consisting of glycine and glutamic acid; the amino acid substitution at position 95 is glycine; the amino acid substitution at position 95 is glutamic acid; the amino acid substitution at position 96 is arginine; the amino acid substitution at position 96 is glutamic acid; the amino acid substitution at position 99 is glutamic acid; the amino acid substitution at position 100 is alanine; the amino acid substitution at position 101 is histidine; the amino acid substitution at position 103 is serine; the amino acid substitution at position 114 is valine; the amino acid substitution at position 127 is selected from the group consisting of arginine, lysine, and histidine; the amino acid substitution at position 158 is cysteine; the amino acid substitution at position 159 is leucine; the amino acid substitution at position 164 is valine; the amino acid substitution at position 182 is valine; the amino acid substitution at position 196 is glycine; wherein the amino acid substitution at position 200 is tryptophan; and the amino acid substitution at position 204 is histidine. In further embodiments, the present invention is directed toward modified TetR(C) proteins that comprise the single or multiple amino acid substitutions at positions of the TetR(C) protein that correspond to those identified in the revTetR(BD) chimeras of Table 1.

[0124] In still another embodiment, the present invention is directed toward a modified TetR(D) protein comprising an amino acid substitution at a position selected from the group consisting of positions 59, 70, 71, 91, 95, 96, 99, 100, 101, 103, 114, 127, 158, 159, 160, 178, 192, 196, and 200 of the TetR(D) protein as depicted in SEQ ID NO: 40, wherein said modified TetR(D) protein binds a TetR(D) operator sequence with greater affinity in the presence of tetracycline than in the absence of tetracycline. In particular aspects of this embodiment: the amino acid substitution at position 59 is selected from the group consisting of glycine, serine, threonine, cysteine, tyrosine, asparagine and glutamine; the amino acid substitution at position 70 is selected from the group consisting of isoleucine, valine, phenylalanine, methionine, and tryptophan; the amino acid substitution at position 71 is selected from the group consisting of leucine, isoleucine, valine, phenylalanine, methionine, and tryptophan; the amino acid substitution at position 91 is selected from the group consisting of glycine, serine, threonine, cysteine, tyrosine, asparagine, and glutamine; the amino acid substitution at position 95 is selected from the group consisting of glycine, serine, threonine, cysteine, tyrosine, asparagine, glutamine, alanine, and glutamic acid; the amino acid substitution at position 96 is selected from the group consisting of aspartic acid, glutamic acid, arginine, lysine, and histidine; the amino acid substitution at position 99 is selected from the group consisting of aspartic acid, and glutamic acid; the amino acid substitution at position 100 is selected from the group consisting of alanine, leucine, isoleucine, valine, pro line, phenylalanine, tryptophan, and methionine; the amino acid substitution at position 101 is selected from the group consisting of arginine, lysine, and histidine; the amino acid substitution at position 103 is selected from the group consisting of glycine, serine, cysteine, tyrosine, asparagine, and glutamine; the amino acid substitution at position 114 is selected from the group consisting of alanine, leucine, isoleucine, valine, proline, phenylalanine, tryptophan, and methionine; the amino acid substitution at position 127 is selected from the group consisting of arginine, lysine, and histidine; the amino acid substitution at position 158 is selected from the group consisting of glycine, serine, threonine, cysteine, tyrosine, and glutamine; the amino acid substitution at position 159 is selected from the group consisting of methionine, leucine, isoleucine, phenylalanine, and tryptophan; the amino acid substitution at position 160 is selected from the group consisting of methionine, leucine, valine, proline, phenylalanine, and tryptophan; the amino acid substitution at position 178 is selected from the group consisting of methionine, leucine, isoleucine, valine, proline, phenylalanine, and tryptophan; the amino acid substitution at position 192 is selected from the group consisting of glycine, threonine, cysteine, tyrosine, asparagine, and glutamine; the amino acid substitution at position 196 is selected from the group consisting of alanine, leucine, isoleucine, valine, proline, phenylalanine, tryptophan, and tyrosine; the amino acid substitution at position 200 is selected from the group consisting of arginine, lysine, and histidine.

[0125] In another embodiment, the present invention is directed toward a modified TetR(D) protein comprising an amino acid substitution at a position selected from the group consisting of positions 59, 70, 71, 91, 95, 96, 99, 100, 101, 103, 114, 127, 158, 159, 160, 178, 192, 196, and 200 of the TetR(D) protein as depicted in SEQ ID NO: 40, wherein said modified TetR(D) protein binds a TetR(D) operator sequence with greater affinity in the presence of tetracycline than in the absence of tetracycline, wherein: the amino acid substitution at position 59 is asparagine; the amino acid substitution at position 70 is valine; the amino acid substitution at position 71 is valine; the amino acid substitution at position 91 is glutamine; the amino acid substitution at position 95 is selected from the group consisting of glycine and glutamic acid; the amino acid substitution at position 95 is glycine; the amino acid substitution at position 96 is arginine; the amino acid substitution at position 96 is glutamic acid; the amino acid substitution at position 99 is glutamic acid; the amino acid substitution at position 100 is alanine; the amino acid substitution at position 101 is histidine; the amino acid substitution at position 103 is serine; the amino acid substitution at position 114 is valine; the amino acid substitution at position 127 is selected from the group consisting of arginine, lysine, and histidine; the amino acid substitution at position 158 is cysteine; the amino acid substitution at position 159 is leucine; the amino acid substitution at position 160 is valine; the amino acid substitution at position 178 is valine; the amino acid substitution at position 192 is glycine; the amino acid substitution at position 196 is tryptophan; and the amino acid substitution at position 200 is histidine. In further embodiments, the present invention is directed toward modified TetR(D) proteins that comprise the single or multiple amino acid substitutions at positions of the TetR(D) protein that correspond to those identified in the revTetR(BD) chimeras of Table 1.

[0126] In a further embodiment, the present invention is directed toward a modified TetR(E) protein comprising an amino acid substitution at a position selected from the group consisting of positions 59, 70, 71, 91, 95, 96, 99, 100, 101, 103, 114, 127, 158, 159, 160, 175, 189, 193, and 197 of the TetR(E) protein as depicted in SEQ ID NO: 42, wherein said modified TetR(E) protein binds a TetR(E) operator sequence with greater affinity in the presence of tetracycline than in the absence of tetracycline. In particular aspects of this embodiment: the amino acid substitution at position 59 is selected from the group consisting of glycine, serine, threonine, cysteine, tyrosine, asparagine and glutamine; the amino acid substitution at position 70 is selected from the group consisting of isoleucine, valine, phenylalanine, methionine, and tryptophan; the amino acid substitution at position 71 is selected from the group consisting of leucine, isoleucine, valine, phenylalanine, methionine, and tryptophan; the amino acid substitution at position 91 is selected from the group consisting of glycine, serine, threonine, cysteine, tyrosine, asparagine, and glutamine; the amino acid substitution at position 95 is selected from the group consisting of glycine, serine, threonine, cysteine, tyrosine, asparagine, glutamine, alanine, and glutamic acid; the amino acid substitution at position 96 is selected from the group consisting of aspartic acid, glutamic acid, arginine, lysine, and histidine; the amino acid substitution at position 99 is selected from the group consisting of aspartic acid, and glutamic acid; the amino acid substitution at position 100 is selected from the group consisting of alanine, leucine, isoleucine, valine, proline, phenylalanine, tryptophan, and methionine; the amino acid substitution at position 101 is selected from the group consisting of arginine, lysine, and histidine; the amino acid substitution at position 103 is selected from the group consisting of glycine, serine, cysteine, tyrosine, asparagine, and glutamine; the amino acid substitution at position 114 is selected from the group consisting of alanine, leucine, isoleucine, valine, proline, phenylalanine, tryptophan, and methionine; the amino acid substitution at position 127 is selected from the group consisting of arginine, lysine, and histidine; the amino acid substitution at position 158 is selected from the group consisting of glycine, serine, threonine, cysteine, tyrosine, and glutamine; the amino acid substitution at position 159 is selected from the group consisting of methionine, leucine, isoleucine, phenylalanine, and tryptophan; the amino acid substitution at position 160 is selected from the group consisting of methionine, leucine, valine, proline, phenylalanine, and tryptophan; the amino acid substitution at position 175 is selected from the group consisting of methionine, leucine, isoleucine, valine, proline, phenylalanine, and tryptophan; the amino acid substitution at position 193 is selected from the group consisting of glycine, threonine, cysteine, tyrosine, asparagine, and glutamine; the amino acid substitution at position 197 is selected from the group consisting of alanine, leucine, isoleucine, valine, proline, phenylalanine, tryptophan, and tyrosine; and the amino acid substitution at position 201 is selected from the group consisting of arginine, lysine, and histidine.

[0127] In a still further embodiment, the present invention is directed toward a modified TetR(E) protein comprising an amino acid substitution at a position selected from the group consisting of positions 59, 70, 71, 91, 95, 96, 99, 100, 101, 103, 114, 127, 158, 159, 160, 175, 189, 193, and 197 of the TetR(E) protein as depicted in SEQ ID NO: 42, wherein said modified TetR(E) protein binds a TetR(E) operator sequence with greater affinity in the presence of tetracycline than in the absence of tetracycline, where: the amino acid substitution at position 59 is asparagine; the amino acid substitution at position 70 is valine; the amino acid substitution at position 71 is valine; the amino acid substitution at position 91 is glutamine; the amino acid substitution at position 95 is selected from the group consisting of glycine and glutamic acid; the amino acid substitution at position 95 is glycine; the amino acid substitution at position 95 is glutamic acid; the amino acid substitution at position 96 is arginine; the amino acid substitution at position 96 is glutamic acid; the amino acid substitution at position 99 is glutamic acid; the amino acid substitution at position 100 is alanine; the amino acid substitution at position 101 is histidine; the amino acid substitution at position 103 is serine; the amino acid substitution at position 114 is valine; the amino acid substitution at position 127 is selected from the group consisting of arginine, lysine, and histidine; the amino acid substitution at position 158 is cysteine; the amino acid substitution at position 159 is leucine; the amino acid substitution at position 160 is valine; the amino acid substitution at position 179 is valine; the amino acid substitution at position 193 is glycine; the amino acid substitution at position 197 is tryptophan; and the amino acid substitution at position 201 is histidine. In further embodiments, the present invention is directed toward modified TetR(E) proteins that comprise the single or multiple amino acid substitutions at positions of the TetR(E) protein that correspond to those identified in the revTetR(BD) chimeras of Table 1.

[0128] In still another embodiment, the present invention is directed toward, a modified TetR(G) protein comprising an amino acid substitution at a position selected from the group consisting of positions 59, 70, 71, 91, 95, 96, 99, 100, 101, 103, 114, 127, 160, 161, 162, 180, 194, 198, and 202 of the TetR(G) protein as depicted in SEQ ID NO: 44, wherein said modified TetR(G) protein binds a TetR(G) operator sequence with greater affinity in the presence of tetracycline than in the absence of tetracycline. In particular aspects of this embodiment: the amino acid substitution at position 59 is selected from the group consisting of glycine, serine, threonine, cysteine, tyrosine, asparagine and glutamine; the amino acid substitution at position 70 is selected from the group consisting of isoleucine, valine, phenylalanine, methionine, and tryptophan; the amino acid substitution at position 71 is selected from the group consisting of leucine, isoleucine, valine, phenylalanine, methionine, and tryptophan; the amino acid substitution at position 91 is selected from the group consisting of glycine, serine, threonine, cysteine, tyrosine, asparagine, and glutamine; the amino acid substitution at position 95 is selected from the group consisting of glycine, serine, threonine, cysteine, tyrosine, asparagine, glutamine, alanine, and glutamic acid; the amino acid substitution at position 96 is selected from the group consisting of aspartic acid, glutamic acid, arginine, lysine, and histidine; the amino acid substitution at position 99 is selected from the group consisting of aspartic acid, and glutamic acid; the amino acid substitution at position 100 is selected from the group consisting of alanine, leucine, isoleucine, valine, proline, phenylalanine, tryptophan, and methionine; the amino acid substitution at position 101 is selected from the group consisting of arginine, lysine, and histidine; the amino acid substitution at position 103 is selected from the group consisting of glycine, serine, cysteine, tyrosine, asparagine, and glutamine; the amino acid substitution at position 114 is selected from the group consisting of alanine, leucine, isoleucine, valine, proline, phenylalanine, tryptophan, and methionine; the amino acid substitution at position 127 is selected from the group consisting of arginine, lysine, and histidine; the amino acid substitution at position 160 is selected from the group consisting of glycine, serine, threonine, cysteine, tyrosine, and glutamine; the amino acid substitution at position 161 is selected from the group consisting of methionine, leucine, isoleucine, phenylalanine, and tryptophan; the amino acid substitution at position 162 is selected from the group consisting of methionine, leucine, valine, proline, phenylalanine, and tryptophan; the amino acid substitution at position 180 is selected from the group consisting of methionine, leucine, isoleucine, valine, proline, phenylalanine, and tryptophan; the amino acid substitution at position 194 is selected from the group consisting of glycine, threonine, cysteine, tyrosine, asparagine, and glutamine; the amino acid substitution at position 198 is selected from the group consisting of alanine, leucine, isoleucine, valine, proline, phenylalanine, tryptophan, and tyrosine; and the amino acid substitution at position 202 is selected from the group consisting of arginine, lysine, and histidine.

[0129] In a still further embodiment, the present invention is directed toward a modified TetR(G) protein comprising an amino acid substitution at a position selected from the group consisting of positions 59, 70, 71, 91, 95, 96, 99, 100, 101, 103, 114, 127, 160, 161, 162, 180, 194, 198, and 202 of the TetR(G) protein as depicted in SEQ ID NO: 44, wherein said modified TetR(G) protein binds a TetR(G) operator sequence with greater affinity in the presence of tetracycline than in the absence of tetracycline and where: the amino acid substitution at position 59 is asparagine; the amino acid substitution at position 70 is valine; the amino acid substitution at position 71 is valine; the amino acid substitution at position 91 is glutamine; the amino acid substitution at position 95 is selected from the group consisting of glycine and glutamic acid; the amino acid substitution at position 95 is glycine; the amino acid substitution at position 95 is glutamic acid; the amino acid substitution at position 96 is arginine; the amino acid substitution at position 96 is glutamic acid; the amino acid substitution at position 99 is glutamic acid; the amino acid substitution at position 100 is alanine; the amino acid substitution at position 101 is histidine; the amino acid substitution at position 103 is serine; the amino acid substitution at position 114 is valine; the amino acid substitution at position 127 is selected from the group consisting of arginine, lysine, and histidine; the amino acid substitution at position 160 is cysteine; the amino acid substitution at position 161 is leucine; the amino acid substitution at position 162 is valine; the amino acid substitution at position 180 is valine; the amino acid substitution at position 194 is glycine; the amino acid substitution at position 198 is tryptophan; and the amino acid substitution at position 202 is histidine. In further embodiments, the present invention is directed toward modified TetR(G) proteins that comprise the single or multiple amino acid substitutions at positions of the TetR(G) protein that correspond to those identified in the revTetR(BD) chimeras of Table 1.

[0130] In another embodiment, the present invention is directed toward a modified TetR(H) protein comprising an amino acid substitution at a position selected from the group consisting of positions 59, 70, 71, 91, 95, 96, 99, 100, 101, 103, 114, 127, 158, 159, 160, 180, 194, 198, and 202 of the TetR(H) protein as depicted in SEQ ID NO: 46, wherein said modified TetR(H) protein binds a TetR(H) operator sequence with greater affinity in the presence of tetracycline than in the absence of tetracycline. In particular aspects of this embodiment: the amino acid substitution at position 59 is selected from the group consisting of glycine, serine, threonine, cysteine, tyrosine, asparagine and glutamine; the amino acid substitution at position 70 is selected from the group consisting of isoleucine, valine, phenylalanine, methionine, and tryptophan; the amino acid substitution at position 71 is selected from the group consisting of leucine, isoleucine, valine, phenylalanine, methionine, and tryptophan; the amino acid substitution at position 91 is selected from the group consisting of glycine, serine, threonine, cysteine, tyrosine, asparagine, and glutamine; the amino acid substitution at position 95 is selected from the group consisting of glycine, serine, threonine, cysteine, tyrosine, asparagine, glutamine, alanine, and glutamic acid; the amino acid substitution at position 96 is selected from the group consisting of aspartic acid, glutamic acid, arginine, lysine, and histidine; the amino acid substitution at position 99 is selected from the group consisting of aspartic acid, and glutamic acid; the amino acid substitution at position 100 is selected from the group consisting of alanine, leucine, isoleucine, valine, proline, phenylalanine, tryptophan, and methionine; the amino acid substitution at position 101 is selected from the group consisting of arginine, lysine, and histidine; the amino acid substitution at position 103 is selected from the group consisting of glycine, serine, cysteine, tyrosine, asparagine, and glutamine; the amino acid substitution at position 114 is selected from the group consisting of alanine, leucine, isoleucine, valine, proline, phenylalanine, tryptophan, and methionine; the amino acid substitution at position 127 is selected from the group consisting of arginine, lysine, and histidine; the amino acid substitution at position 158 is selected from the group consisting of glycine, serine, threonine, cysteine, tyrosine, and glutamine; the amino acid substitution at position 159 is selected from the group consisting of methionine, leucine, isoleucine, phenylalanine, and tryptophan; the amino acid substitution at position 160 is selected from the group consisting of methionine, leucine, valine, proline, phenylalanine, and tryptophan; the amino acid substitution at position 180 is selected from the group consisting of methionine, leucine, isoleucine, valine, proline, phenylalanine, and tryptophan; the amino acid substitution at position 194 is selected from the group consisting of glycine, threonine, cysteine, tyrosine, asparagine, and glutamine; the amino acid substitution at position 198 is selected from the group consisting of alanine, leucine, isoleucine, valine, proline, phenylalanine, tryptophan, and tyrosine; and the amino acid substitution at position 202 is selected from the group consisting of arginine, lysine, and histidine.

[0131] In still another embodiment, the present invention is directed toward a modified TetR(H) protein comprising an amino acid substitution at a position selected from the group consisting of positions 59, 70, 71, 91, 95, 96, 99, 100, 101, 103, 114, 127, 158, 159, 160, 180, 194, 198, and 202 of the TetR(H) protein as depicted in SEQ ID NO: 46, wherein said modified TetR(H) protein binds a TetR(H) operator sequence with greater affinity in the presence of tetracycline than in the absence of tetracycline, where: the amino acid substitution at position 59 is asparagine; the amino acid substitution at position 70 is valine; the amino acid substitution at position 71 is valine; the amino acid substitution at position 91 is glutamine; the amino acid substitution at position 95 is selected from the group consisting of glycine and glutamic acid; the amino acid substitution at position 95 is glycine; the amino acid substitution at position 95 is glutamic acid; the amino acid substitution at position 96 is arginine; the amino acid substitution at position 96 is glutamic acid; the amino acid substitution at position 99 is glutamic acid; the amino acid substitution at position 100 is alanine; the amino acid substitution at position 101 is histidine; the amino acid substitution at position 103 is serine; the amino acid substitution at position 114 is valine; the amino acid substitution at position 127 is selected from the group consisting of arginine, lysine, and histidine; the amino acid substitution at position 127 is arginine; the amino acid substitution at position 127 is lysine; the amino acid substitution at position 127 is arginine; the amino acid substitution at position 127 is histidine; the amino acid substitution at position 158 is cysteine; the amino acid substitution at position 159 is leucine; the amino acid substitution at position 160 is valine; the amino acid substitution at position 180 is valine; the amino acid substitution at position 194 is glycine; the amino acid substitution at position 198 is tryptophan; and the amino acid substitution at position 202 is histidine. In further embodiments, the present invention is directed toward modified TetR(H) proteins that comprise the single or multiple amino acid substitutions at positions of the TetR(H) protein that correspond to those identified in the revTetR(BD) chimeras of Table 1.

[0132] In a still further embodiment, the present invention is directed toward a modified TetR(J) protein comprising an amino acid substitution at an amino acid position selected from the group consisting of positions 59, 70, 71, 91, 95, 96, 99, 100, 101, 103, 114, 127, 158, 159, 160, 180, 194, 198, and 202 of the TetR(J) protein as depicted in SEQ ID NO: 48, wherein said modified TetR(J) protein binds a TetR(J) operator sequence with greater affinity in the presence of tetracycline than in the absence of tetracycline. In particular aspects of this embodiment: the amino acid substitution at position 59 is selected from the group consisting of glycine, serine, threonine, cysteine, tyrosine, asparagine and glutamine; the amino acid substitution at position 70 is selected from the group consisting of isoleucine, valine, phenylalanine, methionine, and tryptophan; the amino acid substitution at position 71 is selected from the group consisting of leucine, isoleucine, valine, phenylalanine, methionine, and tryptophan; the amino acid substitution at position 91 is selected from the group consisting of glycine, serine, threonine, cysteine, tyrosine, asparagine, and glutamine; the amino acid substitution at position 95 is selected from the group consisting of glycine, serine, threonine, cysteine, tyrosine, asparagine, glutamine, alanine, and glutamic acid; the amino acid substitution at position 96 is selected from the group consisting of aspartic acid, glutamic acid, arginine, lysine, and histidine; the amino acid substitution at position 99 is selected from the group consisting of aspartic acid, and glutamic acid; the amino acid substitution at position 100 is selected from the group consisting of alanine, leucine, isoleucine, valine, pro line, phenylalanine, tryptophan, and methionine; the amino acid substitution at position 101 is selected from the group consisting of arginine, lysine, and histidine; the amino acid substitution at position 103 is selected from the group consisting of glycine, serine, cysteine, tyrosine, asparagine, and glutamine; the amino acid substitution at position 114 is selected from the group consisting of alanine, leucine, isoleucine, valine, proline, phenylalanine, tryptophan, and methionine; the amino acid substitution at position 127 is selected from the group consisting of arginine, lysine, and histidine; the amino acid substitution at position 158 is selected from the group consisting of glycine, serine, threonine, cysteine, tyrosine, and glutamine; the amino acid substitution at position 159 is selected from the group consisting of methionine, leucine, isoleucine, phenylalanine, and tryptophan; the amino acid substitution at position 160 is selected from the group consisting of methionine, leucine, valine, proline, phenylalanine, and tryptophan; the amino acid substitution at position 180 is selected from the group consisting of methionine, leucine, isoleucine, valine, proline, phenylalanine, and tryptophan; the amino acid substitution at position 194 is selected from the group consisting of glycine, threonine, cysteine, tyrosine, asparagine, and glutamine; the amino acid substitution at position 198 is selected from the group consisting of alanine, leucine, isoleucine, valine, proline, phenylalanine, tryptophan, and tyrosine; and the amino acid substitution at position 202 is selected from the group consisting of arginine, lysine, and histidine.

[0133] In another embodiment, the present invention is directed toward a modified TetR(J) protein comprising an amino acid substitution at an amino acid position selected from the group consisting of positions 59, 70, 71, 91, 95, 96, 99, 100, 101, 103, 114, 127, 158, 159, 160, 180, 194, 198, and 202 of the TetR(J) protein as depicted in SEQ ID NO: 48, wherein said modified TetR(J) protein binds a TetR(J) operator sequence with greater affinity in the presence of tetracycline than in the absence of tetracycline, where: the amino acid substitution at position 59 is asparagine; the amino acid substitution at position 70 is valine; the amino acid substitution at position 71 is valine; the amino acid substitution at position 91 is glutamine; the amino acid substitution at position 95 is selected from the group consisting of glycine and glutamic acid; the amino acid substitution at position 95 is glycine; the amino acid substitution at position 95 is glutamic acid; the amino acid substitution at position 96 is arginine; the amino acid substitution at position 96 is glutamic acid; the amino acid substitution at position 99 is glutamic acid; the amino acid substitution at position 100 is alanine; the amino acid substitution at position 101 is histidine; the amino acid substitution at position 103 is serine; the amino acid substitution at position 114 is valine; the amino acid substitution at position 127 is selected from the group consisting of arginine, lysine, and histidine; the amino acid substitution at position 158 is cysteine; the amino acid substitution at position 159 is leucine; the amino acid substitution at position 160 is valine; the amino acid substitution at position 180 is valine; the amino acid substitution at position 194 is glycine; the amino acid substitution at position 198 is tryptophan; and the amino acid substitution at position 202 is histidine. In further embodiments, the present invention is directed toward modified TetR(J) proteins that comprise the single or multiple amino acid substitutions at positions of the TetR(J) protein that correspond to those identified in the revTetR(BD) chimeras of Table 1.

[0134] In still another embodiment, the present invention is directed toward a modified TetR(Z) protein comprising an amino acid substitution at an amino acid position selected from the group consisting of positions 63, 74, 75, 95, 99, 100, 103, 104, 105, 107, 118, 137, 165, 166, 167, 181, 185, and 189 of the TetR(Z) protein as depicted in SEQ ID NO: 50, wherein said modified TetR(Z) protein binds a TetR(Z) operator sequence with greater affinity in the presence of tetracycline than in the absence of tetracycline. In particular aspects of this embodiment: the amino acid substitution at position 63 is selected from the group consisting of glycine, serine, threonine, cysteine, tyrosine, asparagine and glutamine; the amino acid substitution at position 74 is selected from the group consisting of isoleucine, valine, phenylalanine, methionine, and tryptophan; the amino acid substitution at position 75 is selected from the group consisting of leucine, isoleucine, valine, phenylalanine, methionine, and tryptophan; the amino acid substitution at position 95 is selected from the group consisting of glycine, serine, threonine, cysteine, tyrosine, asparagine, and glutamine; the amino acid substitution at position 99 is selected from the group consisting of glycine, serine, threonine, cysteine, tyrosine, asparagine, glutamine, alanine, and glutamic acid; the amino acid substitution at position 100 is selected from the group consisting of aspartic acid, glutamic acid, arginine, lysine, and histidine; the amino acid substitution at position 103 is selected from the group consisting of aspartic acid, and glutamic acid; the amino acid substitution at position 104 is selected from the group consisting of alanine, leucine, isoleucine, valine, proline, phenylalanine, tryptophan, and methionine; the amino acid substitution at position 105 is selected from the group consisting of arginine, lysine, and histidine; the amino acid substitution at position 107 is selected from the group consisting of glycine, serine, cysteine, tyrosine, asparagine, and glutamine; the amino acid substitution at position 118 is selected from the group consisting of alanine, leucine, isoleucine, valine, proline, phenylalanine, tryptophan, and methionine; the amino acid substitution at position 137 is selected from the group consisting of arginine, lysine, and histidine; the amino acid substitution at position 165 is selected from the group consisting of glycine, serine, threonine, cysteine, tyrosine, and glutamine; the amino acid substitution at position 166 is selected from the group consisting of methionine, leucine, isoleucine, phenylalanine, and tryptophan; the amino acid substitution at position 167 is selected from the group consisting of methionine, leucine, valine, proline, phenylalanine, and tryptophan; the amino acid substitution at position 181 is selected from the group consisting of glycine, threonine, cysteine, tyrosine, asparagine, and glutamine; the amino acid substitution at position 185 is selected from the group consisting of alanine, leucine, isoleucine, valine, proline, phenylalanine, tryptophan, and tyrosine; and the amino acid substitution at position 189 is selected from the group consisting of arginine, lysine, and histidine.

[0135] In a further embodiment, the present invention is directed toward a modified TetR(Z) protein comprising an amino acid substitution at an amino acid position selected from the group consisting of positions 63, 74, 75, 95, 99, 100, 103, 104, 105, 107, 118, 137, 165, 166, 167, 181, 185, and 189 of the TetR(Z) protein as depicted in SEQ ID NO: 50, wherein said modified TetR(Z) protein binds a TetR(Z) operator sequence with greater affinity in the presence of tetracycline than in the absence of tetracycline, where: the amino acid substitution at position 63 is asparagine, the amino acid substitution at position 74 is valine; the amino acid substitution at position 75 is valine; the amino acid substitution at position 95 is glutamine; the amino acid substitution at position 99 is selected from the group consisting of glycine and glutamic acid; the amino acid substitution at position 99 is glycine; the amino acid substitution at position 99 is glutamic acid; the amino acid substitution at position 100 is arginine; the amino acid substitution at position 100 is glutamic acid; the amino acid substitution at position 103 is glutamic acid; the amino acid substitution at position 104 is alanine; the amino acid substitution at position 105 is histidine; the amino acid substitution at position 107 is serine; the amino acid substitution at position 118 is valine; the amino acid substitution at position 137 is selected from the group consisting of arginine, lysine, and histidine; the amino acid substitution at position 165 is cysteine; the amino acid substitution at position 166 is leucine; the amino acid substitution at position 167 is valine; the amino acid substitution at position 181 is glycine; the amino acid substitution at position 185 is tryptophan; and the amino acid substitution at position 189 is histidine. In further embodiments, the present invention is directed toward modified TetR(Z) proteins that comprise the single or multiple amino acid substitutions at positions of the TetR(Z) protein that correspond to those identified in the revTetR(BD) chimeras of Table 1.

[0136] In still further embodiment, the present invention is directed toward a modified TetR(A) protein comprising a plurality of amino acid substitutions at positions selected from the group consisting of positions 59, 70, 71, 91, 95, 96, 98, 99, 100, 101, 103, 110, 114, 127, 157, 158, 159, 160, 179, 189, 193, 195, 197, 201, and 206 of the TetR(A) protein as depicted in SEQ ID NO: 34, wherein said TetR(A) protein binds a TetR(A) operator sequence with greater affinity in the presence of tetracycline than in the absence of tetracycline. In particular aspects of this embodiment: the amino acid substitution at position 98 is histidine; the amino acid substitution at position 110 is selected from the group consisting of alanine, leucine, valine, proline, phenylalanine and tryptophan; the amino acid substitution at position 157 is selected from the group consisting of glycine, serine, threonine, cysteine, tyrosine, asparagine, and glutamine; the amino acid substitution at position 189 is selected from the group consisting of glycine, serine, threonine, cysteine, tyrosine, and asparagine; the amino acid substitution at position 195 is selected from the group consisting of alanine, leucine, proline, phenylalanine, and tryptophan; the amino acid substitution at position 206 is selected from the group consisting of glycine, serine, threonine, cysteine, tyrosine, asparagine, and glutamine; the amino acid substitutions are at positions 96 and 159 and the amino acid substitution at position 96 is arginine and the amino acid substitution at position 159 is leucine; the amino acid substitutions are at positions 96 and 159 and the amino acid substitution at position 96 is glutamic acid and the amino acid substitution at position 159 is leucine; the amino acid substitutions are at positions 96 and 110 and the amino acid substitution at position 96 is arginine and the amino acid substitution at position 110 is phenylalanine; the amino acid substitutions are at positions 96 and 110 and the amino acid substitution at position 96 is glutamic acid and the amino acid substitution at position 110 is phenylalanine; the amino acid substitutions are at positions 96 and 206 and the amino acid substitution at position 96 is arginine and the amino acid substitution at position 206 is serine; the amino acid substitutions are at positions 96 and 206 and the amino acid substitution at position 96 is glutamic acid and the amino acid substitution at position 110 is serine; the amino acid substitutions are at positions 99 and 158 and the amino acid substitution at position 99 is glutamic acid and the amino acid substitution at position 158 is cysteine; the amino acid substitutions are at positions 96, 103, and 114 and the amino acid substitution at position 96 is arginine, the amino acid substitution at position 103 is serine, and the amino acid substitution at position 114 is valine; the amino acid substitutions are at positions 96, 103, and 114 and the amino acid substitution at position 96 is glutamic acid, the amino acid substitution at position 103 is serine, and the amino acid substitution at position 114 is valine; the amino acid substitutions are at positions 96, 157, and 201 and the amino acid substitution at position 96 is arginine, the amino acid substitution at position 157 is asparagine, and the amino acid substitution at position 201 is histidine; the amino acid substitutions are at positions 96, 157, and 201 and the amino acid substitution at position 96 is glutamic acid, the amino acid substitution at position 157 is serine, and the amino acid substitution at position 201 is histidine; the amino acid substitutions are at positions 59, 95, and 100, and the amino acid substitution at position 59 is asparagine, the amino acid substitution at position 95 is glutamic acid, and the amino acid substitution at position 100 is alanine; the amino acid substitutions are at positions 59, 95, and 100, and the amino acid substitution at position 59 is asparagine, the amino acid substitution at position 95 is glycine, and the amino acid substitution at position 100 is alanine; the amino acid substitutions are at positions 160, 179, and 197, and the amino acid substitution at position 160 is valine, the amino acid substitution at position 179 is valine, and the amino acid substitution at position 197 is tryptophan; the amino acid substitutions are at positions 70, 91, and 99, and the amino acid substitution at position 70 is valine, the amino acid substitution at position 91 is glutamine, and the amino acid substitution at position 99 is glutamic acid; the amino acid substitutions are at positions 71, 95, and 127, and the amino acid substitution at position 71 is valine, the amino acid substitution at position 95 is glutamic acid, and the amino acid substitution at position 127 arginine; the amino acid substitutions are at positions 71, 95, and 127, and the amino acid substitution at position 71 is valine, the amino acid substitution at position 95 is arginine, and the amino acid substitution at position 127 arginine; and the amino acid substitutions are at positions 59, 101, and 192, and the amino acid substitution at position 59 is asparagine, the amino acid substitution at position 101 is histidine, and the amino acid substitution at position 193 glycine.

[0137] In another embodiment, the present invention is directed toward a modified TetR(B) protein comprising a plurality of amino acid substitutions at positions selected from the group consisting of positions 59, 70, 71, 91, 95, 96, 98, 99, 100, 101, 103, 110, 114, 127, 157, 158, 159, 160, 178, 188, 192, 194, 196, 200, and 205 of the TetR(B) protein as depicted in SEQ ID NO: 36, wherein said modified TetR(B) protein binds a TetR(B) operator sequence with greater affinity in the presence of tetracycline than in the absence of tetracycline. In particular aspects of this embodiment: the amino acid substitution at position 98 is arginine; the amino acid substitution at position 98 is histidine; the amino acid substitution at position 110 is selected from the group consisting of alanine, leucine, valine, proline, phenylalanine and tryptophan; the amino acid substitution at position 157 is selected from the group consisting of glycine, serine, threonine, cysteine, tyrosine, asparagine, and glutamine; the amino acid substitution at position 188 is selected from the group consisting of glycine, serine, threonine, cysteine, tyrosine, glutamine, and asparagine; the amino acid substitution at position 194 is selected from the group consisting of alanine, leucine, valine, proline, phenylalanine, and tryptophan; the amino acid substitution at position 205 is selected from the group consisting of glycine, serine, threonine, cysteine, tyrosine, asparagine, and glutamine; the amino acid substitutions are at positions 96 and 159 and the amino acid substitution at position 96 is arginine and the amino acid substitution at position 159 is leucine; the amino acid substitutions are at positions 96 and 159 and the amino acid substitution at position 96 is glutamic acid and the amino acid substitution at position 159 is leucine; the amino acid substitutions are at positions 96 and 188, and the amino acid substitution at position 96 is arginine and the amino acid substitution at position 188 is glutamine; the amino acid substitutions are at positions 96 and 188, and the amino acid substitution at position 96 glutamic acid, and the amino acid substitution at position 188 is glutamine; the amino acid substitutions are at positions 96 and 110, and the amino acid substitution at position 96 is arginine and the amino acid substitution at position 110 is phenylalanine; the amino acid substitutions are at positions 96 and 110, and the amino acid substitution at position 96 is glutamic acid and the amino acid substitution at position 110 is phenylalanine; the amino acid substitutions are at positions 99 and 194, and the amino acid substitution at position 99 is glutamic acid and the amino acid substitution at position 194 is valine; the amino acid substitutions are at positions 99 and 158, and the amino acid substitution at position 99 is glutamic acid and the amino acid substitution at position 158 is cysteine; the amino acid substitutions are at positions 96, 103, and 114, and the amino acid substitution at position 96 is arginine, the amino acid substitution at position 103 is serine, and the amino acid substitution at position 114 is valine; the amino acid substitutions are at positions 96, 103, and 114, and the amino acid substitution at position 96 is glutamic acid, the amino acid substitution at position 103 is serine, and the amino acid substitution at position 114 is valine; the amino acid substitutions are at positions 96, 157, and 200, and the amino acid substitution at position 96 is arginine, the amino acid substitution at position 157 is asparagine, and the amino acid substitution at position 200 is histidine; the amino acid substitutions are at positions 96, 157, and 200, and the amino acid substitution at position 96 is glutamic acid, the amino acid substitution at position 157 is serine, and the amino acid substitution at position 200 is histidine; the amino acid substitutions are at positions 59, 95, and 100, and the amino acid substitution at position 59 is asparagine, the amino acid substitution at position 95 is glutamic acid, and the amino acid substitution at position 100 is alanine; the amino acid substitutions are at positions 59, 95, and 100, and the amino acid substitution at position 59 is asparagine, the amino acid substitution at position 95 is glycine, and the amino acid substitution at position 100 is alanine; the amino acid substitutions are at positions 160, 178, and 196, and the amino acid substitution at position 160 is valine, the amino acid substitution at position 178 is valine, and the amino acid substitution at position 196 is tryptophan, and the amino acid substitutions are at positions 70, 91, and 99; the amino acid substitution at position 70 is valine, the amino acid substitution at position 91 is glutamine, and the amino acid substitution at position 99 is glutamic acid; the amino acid substitutions are at positions 71, 95, and 127, and the amino acid substitution at position 71 is valine, the amino acid substitution at position 95 is glutamic acid, and the amino acid substitution at position 127 arginine; the amino acid substitutions are at positions 71, 95, and 127, and the amino acid substitution at position 71 is valine, the amino acid substitution at position 95 is arginine, and the amino acid substitution at position 127 arginine; the amino acid substitutions are at positions 59, 98, 101, and 192, and the amino acid substitution at position 59 is asparagine, the amino acid substitution at position 98 is arginine, the amino acid substitution at position 101 is histidine, and the amino acid substitution at position 193 is glycine.

[0138] In a further embodiment, the present invention is directed toward a modified TetR(C) protein comprising a plurality of amino acid substitutions at positions selected from the group consisting of positions 59, 70, 71, 91, 95, 96, 98, 99, 100, 101, 103, 110, 114, 127, 157, 158, 159, 164, 182, 192, 196, 198, 200, 204, and 209 of the TetR(C) protein as depicted in SEQ ID NO: 35, wherein said TetR(C) protein binds a TetR(C) operator sequence with greater affinity in the presence of tetracycline than in the absence of tetracycline. In particular aspects of this embodiment, the amino acid substitution at position 98 is histidine; the amino acid substitution at position 110 is selected from the group consisting of alanine, leucine, valine, proline, phenylalanine and tryptophan; the amino acid substitution at position 157 is selected from the group consisting of glycine, serine, threonine, cysteine, tyrosine, asparagine, and glutamine; the amino acid substitution at position 192 is selected from the group consisting of glycine, serine, threonine, cysteine, tyrosine, glutamine, and asparagine; the amino acid substitution at position 198 is selected from the group consisting of alanine, leucine, valine, proline, phenylalanine, and tryptophan; the amino acid substitution at position 209 is selected from the group consisting of glycine, serine, threonine, cysteine, tyrosine, asparagine, and glutamine; the amino acid substitutions are at positions 96 and 159, and the amino acid substitution at position 96 is arginine and the amino acid substitution at position 159 is leucine; the amino acid substitutions are at positions 96 and 159, and the amino acid substitution at position 96 is glutamic acid and the amino acid substitution at position 159 is leucine; the amino acid substitutions are at positions 96 and 192, and the amino acid substitution at position 96 is arginine and the amino acid substitution at position 192 is glutamine; the amino acid substitutions are at positions 96 and 192, and the amino acid substitution at position 96 is glutamic acid, and the amino acid substitution at position 192 is glutamine; the amino acid substitutions are at positions 96 and 110, and the amino acid substitution at position 96 is arginine and the amino acid substitution at position 110 is phenylalanine; the amino acid substitutions are at positions 96 and 110, and the amino acid substitution at position 96 is glutamic acid and the amino acid substitution at position 110 is phenylalanine; the amino acid substitutions are at positions 96 and 209, and the amino acid substitution at position 96 is arginine and the amino acid substitution at position 209 is serine; the amino acid substitutions are at positions 96 and 209, and the amino acid substitution at position 96 is glutamic acid and the amino acid substitution at position 209 is serine; the amino acid substitutions are at positions 99 and 198, and the amino acid substitution at position 198 is valine; the amino acid substitutions are at positions 99 and 158, and the amino acid substitution at position 99 is glutamic acid and the amino acid substitution at position 158 is cysteine; the amino acid substitutions are at positions 96, 103, and 114, and the amino acid substitution at position 96 is arginine, the amino acid substitution at position 103 is serine, and the amino acid substitution at position 114 is valine; the amino acid substitutions are at positions 96, 103, and 114, and the amino acid substitution at position 96 is glutamic acid, the amino acid substitution at position 103 is serine, and the amino acid substitution at position 114 is valine; the amino acid substitutions are at positions 96, 157, and 204, and the amino acid substitution at position 96 is arginine, the amino acid substitution at position 157 is asparagine, and the amino acid substitution at position 204 is histidine; the amino acid substitutions are at positions 96, 157, and 204, and the amino acid substitution at position 96 is glutamic acid, the amino acid substitution at position 157 is serine, and the amino acid substitution at position 204 is histidine; the amino acid substitutions are at positions 59, 95, and 100, and the amino acid substitution at position 59 is asparagine, the amino acid substitution at position 95 is glutamic acid, and the amino acid substitution at position 100 is alanine; the amino acid substitutions are at positions 59, 95, and 100, and the amino acid substitution at position 59 is asparagine, the amino acid substitution at position 95 is glycine, and the amino acid substitution at position 100 is alanine; the amino acid substitutions are at positions 164, 182, and 200, and the amino acid substitution at position 164 is valine, the amino acid substitution at position 182 is valine, and the amino acid substitution at position 200 is tryptophan; the amino acid substitutions are at positions 70, 91, and 99, and the amino acid substitution at position 70 is valine, the amino acid substitution at position 91 is glutamine, and the amino acid substitution at position 99 is glutamic acid; the amino acid substitutions are at positions 71, 95, and 127, and the amino acid substitution at position 71 is valine, the amino acid substitution at position 95 is glutamic acid, and the amino acid substitution at position 127 arginine; the amino acid substitutions are at positions 71, 95, and 127, and the amino acid substitution at position 71 is valine, the amino acid substitution at position 95 is arginine, and the amino acid substitution at position 127 arginine, the amino acid substitutions are at positions 59, 101, and 196, and the amino acid substitution at position 59 is asparagine, the amino acid substitution at position 101 is histidine, and the amino acid substitution at position 196 glycine.

[0139] In a still further embodiment, the present invention is directed toward a modified TetR(D) protein comprising a plurality of amino acid substitutions at positions selected from the group consisting of positions 59, 70, 71, 91, 95, 96, 98, 99, 100, 101, 103, 110, 114, 127, 157, 158, 159, 160, 178, 188, 192, 194, 196, 200, and 205 of the TetR(D) protein as depicted in SEQ ID NO: 36, wherein said TetR(D) protein binds a TetR(D) operator sequence with greater affinity in the presence of tetracycline than in the absence of tetracycline. In particular aspects of this embodiment, the amino acid substitution at position 98 is arginine; the amino acid substitution at position 110 is selected from the group consisting of alanine, leucine, valine, proline, phenylalanine and tryptophan, the amino acid substitution at position 157 is selected from the group consisting of glycine, serine, threonine, cysteine, tyrosine, asparagine, and glutamine; the amino acid substitution at position 188 is selected from the group consisting of glycine, serine, threonine, cysteine, tyrosine, glutamine, and asparagine; the amino acid substitution at position 194 is selected from the group consisting of alanine, leucine, valine, proline, phenylalanine, and tryptophan; the amino acid substitution at position 205 is selected from the group consisting of glycine, serine, threonine, cysteine, tyrosine, asparagine, and glutamine; the amino acid substitutions are at positions 96 and 159, and the amino acid substitution at position 96 is arginine and the amino acid substitution at position 159 is leucine; the amino acid substitutions are at positions 96 and 159, and the amino acid substitution at position 96 is glutamic acid and the amino acid substitution at position 159 is leucine; the amino acid substitutions are at positions 96 and 188, and the amino acid substitution at position 96 is arginine and the amino acid substitution at position 188 is glutamine; the amino acid substitutions are at positions 96 and 188, and the amino acid substitution at position 96 is glutamic acid, and the amino acid substitution at position 188 is glutamine; the amino acid substitutions are at positions 96 and 110, and the amino acid substitution at position 96 is arginine and the amino acid substitution at position 110 is phenylalanine; the amino acid substitutions are at positions 96 and 110, and the amino acid substitution at position 96 is glutamic acid and the amino acid substitution at position 110 is phenylalanine; the amino acid substitutions are at positions 96 and 205, and the amino acid substitution at position 96 is arginine and the amino acid substitution at position 205 is serine; the amino acid substitutions are at positions 96 and 205, and the amino acid substitution at position 96 is glutamic acid and the amino acid substitution at position 205 is serine; the amino acid substitutions are at positions 99 and 194, and the amino acid substitution at position 99 is glutamic acid and the amino acid substitution at position 194 is valine; the amino acid substitutions are at positions 99 and 158, and the amino acid substitution at position 99 is glutamic acid and the amino acid substitution at position 158 is cysteine; the amino acid substitutions are at positions 96, 103, and 114, and the amino acid substitution at position 96 is arginine, the amino acid substitution at position 103 is serine, and the amino acid substitution at position 114 is valine; the amino acid substitutions are at positions 96, 103, and 114, and the amino acid substitution at position 96 is glutamic acid, the amino acid substitution at position 103 is serine, and the amino acid substitution at position 114 is valine; the amino acid substitutions are at positions 96, 157, and 200, and the amino acid substitution at position 96 is arginine, the amino acid substitution at position 157 is asparagine, and the amino acid substitution at position 200 is histidine; the amino acid substitutions are at positions 96, 157, and 200, and the amino acid substitution at position 96 is glutamic acid, the amino acid substitution at position 157 is serine, and the amino acid substitution at position 200 is histidine; the amino acid substitutions are at positions 59, 95, and 100, and the amino acid substitution at position 59 is asparagine, the amino acid substitution at position 95 is glutamic acid, and the amino acid substitution at position 100 is alanine; the amino acid substitutions are at positions 59, 95, and 100, and the amino acid substitution at position 59 is asparagine, the amino acid substitution at position 95 is glycine, and the amino acid substitution at position 100 is alanine; the amino acid substitutions are at positions 160, 178, and 196, and the amino acid substitution at position 160 is valine, the amino acid substitution at position 178 is valine, and the amino acid substitution at position 196 is tryptophan; the amino acid substitutions are at positions 70, 91, and 99, and the amino acid substitution at position 70 is valine, the amino acid substitution at position 91 is glutamine, and the amino acid substitution at position 99 is glutamic acid; the amino acid substitutions are at positions 71, 95, and 127, and the amino acid substitution at position 71 is valine, the amino acid substitution at position 95 is glutamic acid, and the amino acid substitution at position 127 arginine; the amino acid substitutions are at positions 71, 95, and 127, and the amino acid substitution at position 71 is valine, the amino acid substitution at position 95 is arginine, and the amino acid substitution at position 127 arginine; the amino acid substitutions are at positions 59, 98, 101, and 196, and the amino acid substitution at position 59 is asparagine, the amino acid substitution at position 98 is arginine, the amino acid substitution at position 101 is histidine, and the amino acid substitution at position 196 glycine.

[0140] In another embodiment, the present invention is directed toward a modified TetR(E) protein comprising a plurality of amino acid substitutions at positions selected from the group consisting of positions 59, 70, 71, 91, 95, 96, 98, 99, 100, 101, 103, 110, 114, 127, 157, 158, 159, 160, 175, 185, 189, 191, 193, 197, and 202 of the TetR(E) protein as depicted in SEQ ID NO: 37, wherein said modified TetR(E) protein binds a TetR(E) operator sequence with greater affinity in the presence of tetracycline than in the absence of tetracycline. In particular aspects of this embodiment: the amino acid substitution at position 98 is histidine; the amino acid substitution at position 110 is selected from the group consisting of alanine, leucine, valine, proline, phenylalanine and tryptophan; the amino acid substitution at position 157 is selected from the group consisting of glycine, serine, threonine, cysteine, tyrosine, asparagine, and glutamine; the amino acid substitution at position 185 is selected from the group consisting of glycine, serine, threonine, cysteine, tyrosine, glutamine, and asparagine; the amino acid substitution at position 191 is selected from the group consisting of alanine, leucine, valine, proline, phenylalanine, and tryptophan; the amino acid substitution at position 202 is selected from the group consisting of glycine, serine, threonine, cysteine, tyrosine, asparagine, and glutamine; the amino acid substitutions are at positions 96 and 159, and the amino acid substitution at position 96 is arginine and the amino acid substitution at position 159 is leucine; the amino acid substitutions are at positions 96 and 159, and the amino acid substitution at position 96 is glutamic acid and the amino acid substitution at position 159 is leucine; the amino acid substitutions are at positions 96 and 185, and the amino acid substitution at position 96 is arginine and the amino acid substitution at position 185 is glutamine; the amino acid substitutions are at positions 96 and 185, and the amino acid substitution at position 96 is glutamic acid, and the amino acid substitution at position 185 is glutamine; the amino acid substitutions are at positions 96 and 202, and the amino acid substitution at position 96 is arginine and the amino acid substitution at position 202 is serine; the amino acid substitutions are at positions 96 and 202, and the amino acid substitution at position 96 is glutamic acid and the amino acid substitution at position 202 is serine; the amino acid substitutions are at positions 99 and 191, and the amino acid substitution at position 99 is glutamic acid and the amino acid substitution at position 191 is valine; the amino acid substitutions are at positions 99 and 158, and the amino acid substitution at position 99 is glutamic acid and the amino acid substitution at position 158 is cysteine; the amino acid substitutions are at positions 96, 103, and 114, and the amino acid substitution at position 96 is arginine, the amino acid substitution at position 103 is serine, and the amino acid substitution at position 114 is valine; the amino acid substitutions are at positions 96, 103, and 114, and the amino acid substitution at position 96 is glutamic acid, the amino acid substitution at position 103 is serine, and the amino acid substitution at position 114 is valine; the amino acid substitutions are at positions 96, 157, and 197, and the amino acid substitution at position 96 is arginine, the amino acid substitution at position 157 is asparagine, and the amino acid substitution at position 197 is histidine; the amino acid substitutions are at positions 96, 157, and 197, and the amino acid substitution at position 96 is glutamic acid, the amino acid substitution at position 157 is serine, and the amino acid substitution at position 197 is histidine; the amino acid substitutions are at positions 59, 95, and 100, and the amino acid substitution at position 59 is asparagine, the amino acid substitution at position 95 is glutamic acid, and the amino acid substitution at position 100 is alanine; the amino acid substitutions are at positions 59, 95, and 100, and the amino acid substitution at position 59 is asparagine, the amino acid substitution at position 95 is glycine, and the amino acid substitution at position 100 is alanine; the amino acid substitutions are at positions 160, 175, and 193, and the amino acid substitution at position 160 is valine, the amino acid substitution at position 175 is valine, and the amino acid substitution at position 193 is tryptophan; the amino acid substitutions are at positions 70, 91, and 99, and the amino acid substitution at position 70 is valine, the amino acid substitution at position 91 is glutamine, and the amino acid substitution at position 99 is glutamic acid; the amino acid substitutions are at positions 71, 95, and 127, and the amino acid substitution at position 71 is valine, the amino acid substitution at position 95 is glutamic acid, and the amino acid substitution at position 127 arginine; the amino acid substitutions are at positions 71, 95, and 127, and the amino acid substitution at position 71 is valine, the amino acid substitution at position 95 is arginine, and the amino acid substitution at position 127 arginine; the amino acid substitutions are at positions 59, 101, and 189, and the amino acid substitution at position 59 is asparagine, the amino acid substitution at position 101 is histidine, and the amino acid substitution at position 189 glycine.

[0141] In a still further embodiment, the present invention is directed to a modified TetR(G) protein comprising a plurality of amino acid substitutions at positions selected from the group consisting of positions 59, 70, 71, 91, 95, 96, 98, 99, 100, 101, 103, 110, 114, 127, 159, 160, 161, 162, 180, 190, 194, 196, 198, 202, and 207 of the TetR(G) protein as depicted in SEQ ID NO: 38, wherein said modified TetR(G) protein binds a TetR(G) operator sequence with greater affinity in the presence of tetracycline than in the absence of tetracycline. In particular aspects of this embodiment: the amino acid substitution at position 98 is histidine; the amino acid substitution at position 110 is selected from the group consisting of alanine, leucine, valine, proline, and tryptophan; the amino acid substitution at position 159 is selected from the group consisting of glycine, serine, threonine, cysteine, tyrosine, asparagine, and glutamine; the amino acid substitution at position 190 is selected from the group consisting of glycine, serine, threonine, cysteine, tyrosine, glutamine, and asparagine; the amino: acid substitution at position 196 is selected from the group consisting of alanine, leucine, valine, proline, phenylalanine, and tryptophan; the amino acid substitution at position 207 is selected from the group consisting of glycine, serine, threonine, cysteine, tyrosine, asparagine, and glutamine; the amino acid substitutions are at positions 96 and 161, and the amino acid substitution at position 96 is arginine and the amino acid substitution at position 161 is leucine; the amino acid substitutions are at positions 96 and 161, and the amino acid substitution at position 96 is glutamic acid and the amino acid substitution at position 161 is leucine; the amino acid substitutions are at positions 96 and 190, and the amino acid substitution at position 96 is arginine and the amino acid substitution at position 190 is glutamine; the amino acid substitutions are at positions 96 and 190, and the amino acid substitution at position 96 is glutamic acid, and the amino acid substitution at position 190 is glutamine; the amino acid substitutions are at positions 96 and 207, and the amino acid substitution at position 96 is arginine and the amino acid substitution at position 207 is serine; the amino acid substitutions are at positions 96 and 207, and the amino acid substitution at position 96 is glutamic acid and the amino acid substitution at position 207 is serine; the amino acid substitutions are at positions 99 and 196, and the amino acid substitution at position 99 is glutamic acid and the amino acid substitution at position 196 is valine; the amino acid substitutions are at positions 99 and 160, and the amino acid substitution at position 99 is glutamic acid and the amino acid substitution at position 160 is cysteine; the amino acid substitutions are at positions 96, 103, and 114, and the amino acid substitution at position 96 is arginine, the amino acid substitution at position 103 is serine, and the amino acid substitution at position 114 is valine; the amino acid substitutions are at positions 96, 103, and 114, and the amino acid substitution at position 96 is glutamic acid, the amino acid substitution at position 103 is serine, and the amino acid substitution at position 114 is valine; the amino acid substitutions are at positions 96, and 202, and the amino acid substitution at position 96 is arginine, the amino acid substitution at position 202 is histidine; the amino acid substitutions are at positions 96, and 202, and the amino acid substitution at position 96 is glutamic acid, the amino acid substitution at position 202 is histidine; the amino acid substitutions are at positions 59, 95, and 100, and the amino acid substitution at position 59 is asparagine, the amino acid substitution at position 95 is glutamic acid, and the amino acid substitution at position 100 is alanine; the amino acid substitutions are at positions 59, 95, and 100, and the amino acid substitution at position 59 is asparagine, the amino acid substitution at position 95 is glycine, and the amino acid substitution at position 100 is alanine; the amino acid substitutions are at positions 162, 180, and 198, and the amino acid substitution at position 162 is valine, the amino acid substitution at position 180 is valine, and the amino acid substitution at position 198 is tryptophan; the amino acid substitutions are at positions 70, 91, and 99, and the amino acid substitution at position 70 is valine, the amino acid substitution at position 91 is glutamine, and the amino acid substitution at position 99 is glutamic acid; the amino acid substitutions are at positions 71, 95, and 127, and the amino acid substitution at position 71 is valine, the amino acid substitution at position 95 is glutamic acid, and the amino acid substitution at position 127 arginine; the amino acid substitutions are at positions 71, 95, and 127, and the amino acid substitution at position 71 is valine, the amino acid substitution at position 95 is arginine, and the amino acid substitution at position 127 arginine; the amino acid substitutions are at positions 59, 101, and 194, and the amino acid substitution at position 59 is asparagine, the amino acid substitution at position 101 is histidine, and the amino acid substitution at position 194 glycine.

[0142] In another embodiment, the present invention is directed toward a modified TetR(H) protein comprising a plurality of amino acid substitutions at positions selected from the group consisting of positions 59, 70, 71, 91, 95, 96, 98, 99, 100, 101, 103, 110, 114, 127, 157, 158, 159, 160, 180, 190, 194, 196, 198, 202, and 207 of the TetR(H) protein as depicted in SEQ ID NO: 39, wherein said modified TetR(H) protein binds a TetR(H) operator sequence with greater affinity in the presence of tetracycline than in the absence of tetracycline. In particular aspects of this embodiment, the amino acid substitution at position 98 is arginine; the amino acid substitution at position 110 is selected from the group consisting of alanine, leucine, valine, proline, phenylalanine and tryptophan; the amino acid substitution at position 157 is selected from the group consisting of glycine, serine, threonine, cysteine, tyrosine, asparagine, and glutamine; the amino acid substitution at position 190 is selected from the group consisting of glycine, serine, threonine, cysteine, tyrosine, glutamine, and asparagine; the amino acid substitution at position 196 is selected from the group consisting of alanine, leucine, valine, proline, phenylalanine, and tryptophan; the amino acid substitution at position 207 is selected from the group consisting of glycine, serine, threonine, cysteine, tyrosine, asparagine, and glutamine; the amino acid substitutions are at positions 96 and 159, and the amino acid substitution at position 96 is arginine and the amino acid substitution at position 159 is leucine; the amino acid substitutions are at positions 96 and 159, and the amino acid substitution at position 96 is glutamic acid and the amino acid substitution at position 159 is leucine; the amino acid substitutions are at positions 96 and 190, and the amino acid substitution at position 96 is arginine and the amino acid substitution at position 190 is glutamine; the amino acid substitution at position 96 is glutamic acid, and the amino acid substitution at position 188 is glutamine; the amino acid substitutions are at positions 96 and 207, and the amino acid substitution at position 96 is arginine and the amino acid substitution at position 207 is serine; the amino acid substitution at position 96 is glutamic acid and the amino acid substitution at position 205 is serine; the amino acid substitutions are at positions 99 and 196, and the amino acid substitution at position 99 is glutamic acid and the amino acid substitution at position 196 is valine; the amino acid substitutions are at positions 99 and 160, and the amino acid substitution at position 99 is glutamic acid and the amino acid substitution at position 160 is cysteine; the amino acid substitutions are at positions 96, 103, and 114, and the amino acid substitution at position 96 is arginine, the amino acid substitution at position 103 is serine, and the amino acid substitution at position 114 is valine; the amino acid substitutions are at positions 96, 103, and 114, and the amino acid substitution at position 96 is glutamic acid, the amino acid substitution at position 103 is serine, and the amino acid substitution at position 114 is valine; the amino acid substitutions are at positions 96, 157, and 202, and the amino acid substitution at position 96 is arginine, the amino acid substitution at position 157 is asparagine, and the amino acid substitution at position 202 is histidine; the amino acid substitutions are at positions 96, 157, and 202, and the amino acid substitution at position 96 is glutamic acid, the amino acid substitution at position 157 is serine, and the amino acid substitution at position 202 is histidine; the amino acid substitutions are at positions 59, 95, and 100, and the amino acid substitution at position 59 is asparagine, the amino acid substitution at position 95 is glutamic acid, and the amino acid substitution at position 100 is alanine; the amino acid substitutions are at positions 59, 95, and 100, and the amino acid substitution at position 59 is asparagine, the amino acid substitution at position 95 is glycine, and the amino acid substitution at position 100 is alanine; the amino acid substitutions are at positions 160, 180, and 198, and the amino acid substitution at position 160 is valine, the amino acid substitution at position 180 is valine, and the amino acid substitution at position 198 is tryptophan; the amino acid substitutions are at positions 70, 91, and 99, and the amino acid substitution at position 70 is valine, the amino acid substitution at position 91 is glutamine, and the amino acid substitution at position 99 is glutamic acid; the amino acid substitutions are at positions 71, 95, and 127, and the amino acid substitution at position 71 is valine, the amino acid substitution at position 95 is glutamic acid, and the amino acid substitution at position 127 arginine; the amino acid substitutions are at positions 71, 95, and 127, and the amino acid substitution at position 71 is valine, the amino acid substitution at position 95 is arginine, and the amino acid substitution at position 127 arginine; the amino acid substitutions are at positions 59, 101, and 194, and the amino acid substitution at position 59 is asparagine, the amino acid substitution at position 101 is histidine, and the amino acid substitution at position 194 glycine.

[0143] In a further embodiment, the present invention is directed toward a modified TetR(J) protein comprising a plurality of amino acid substitutions at amino acid positions selected from the group consisting of positions 59, 70, 71, 91, 95, 96, 98, 99, 100, 101, 103, 110, 114, 127, 157, 158, 159, 160, 180, 190, 194, 196, 198, 202, and 207 of the TetR(J) protein as depicted in SEQ ID NO: 40, wherein said modified TetR(J) protein binds a TetR(J) operator sequence with greater affinity in the presence of tetracycline than in the absence of tetracycline. In particular aspects of this embodiment: the amino acid substitution at position 98 is arginine; the amino acid substitution at position 110 is selected from the group consisting of alanine, leucine, valine, proline, phenylalanine and tryptophan; the amino acid substitution at position 157 is selected from the group consisting of glycine, serine, threonine, cysteine, tyrosine, asparagine, and glutamine; the amino acid substitution at position 190 is selected from the group consisting of glycine, serine, threonine, cysteine, tyrosine, glutamine, and asparagine; the amino acid substitution at position 196 is selected from the group consisting of alanine, leucine, valine, proline, phenylalanine, and tryptophan; the amino acid substitution at position 207 is selected from the group consisting of glycine, serine, threonine, cysteine, tyrosine, asparagine, and glutamine; the amino acid substitutions are at positions 96 and 159, and the amino acid substitution at position 96 is arginine and the amino acid substitution at position 159 is leucine; the amino acid substitutions are at positions 96 and 159, and the amino acid substitution at position 96 is glutamic acid and the amino acid substitution at position 159 is leucine; the amino acid substitutions are at positions 96 and 190, and the amino acid substitution at position 96 is arginine and the amino acid substitution at position 190 is glutamine; the amino acid substitutions are at positions 96 and 190, and the amino acid substitution at position 96 is glutamic acid, and the amino acid substitution at position 188 is glutamine; the amino acid substitutions are at positions 96 and 207, and the amino acid substitution at position 96 is arginine and the amino acid substitution at position 207 is serine; the amino acid substitutions are at positions 96 and 207, and the amino acid substitution at position 96 is glutamic acid and the amino acid substitution at position 207 is serine; the amino acid substitutions are at positions 99 and 196, and the amino acid substitution at position 99 is glutamic acid and the amino acid substitution at position 196 is valine; the amino acid substitutions are at positions 99 and 160, and the amino acid substitution at position 99 is glutamic acid and the amino acid substitution at position 160 is cysteine; the amino acid substitutions are at positions 96, 103, and 114, and the amino acid substitution at position 96 is arginine, the amino acid substitution at position 103 is serine, and the amino acid substitution at position 114 is valine; the amino acid substitutions are at positions 96, 103, and 114, and the amino acid substitution at position 96 is glutamic acid, the amino acid substitution at position 103 is serine, and the amino acid substitution at position 114 is valine; the amino acid substitutions are at positions 96, 157, and 202, and the amino acid substitution at position 96 is arginine, the amino acid substitution at position 157 is asparagine, and the amino acid substitution at position 202 is histidine; the amino acid substitutions are at positions 96, 157, and 202, and the amino acid substitution at position 96 is glutamic acid, the amino acid substitution at position 157 is serine, and the amino acid substitution at position 202 is histidine; the amino acid substitutions are at positions 59, 95, and 100, and the amino acid substitution at position 59 is asparagine, the amino acid substitution at position 95 is glutamic acid, and the amino acid substitution at position 100 is alanine; the amino acid substitutions are at positions 59, 95, and 100, and the amino acid substitution at position 59 is asparagine, the amino acid substitution at position 95 is glycine, and the amino acid substitution at position 100 is alanine; the amino acid substitutions are at positions 160, 180, and 198; the amino acid substitution at position 160 is valine, the amino acid substitution at position 180 is valine, and the amino acid substitution at position 198 is tryptophan; the amino acid substitutions are at positions 70, 91, and 99, and the amino acid substitution at position 70 is valine, the amino acid substitution at position 91 is glutamine, and the amino acid substitution at position 99 is glutamic acid; the amino acid substitutions are at positions 71, 95, and 127, and the amino acid substitution at position 71 is valine, the amino acid substitution at position 95 is glutamic acid, and the amino acid substitution at position 127 arginine; the amino acid substitutions are at positions 71, 95, and 127, and the amino acid substitution at position 71 is valine, the amino acid substitution at position 95 is arginine, and the amino acid substitution at position 127 arginine; the amino acid substitutions are at positions 59, 101, and 194, and the amino acid substitution at position 59 is asparagine, the amino acid substitution at position 101 is histidine, and the amino acid substitution at position 194 glycine.

[0144] In another embodiment, the present invention is directed toward a modified TetR(Z) protein comprising a plurality of amino acid substitutions at amino acid positions selected from the group consisting of positions 63, 74, 75, 95, 99, 100, 102, 103, 104, 105, 107, 114, 118, 137, 164, 165, 166, 167, 177, 181, 183, 185, 189, and 194 of the TetR(Z) protein as depicted in SEQ ID NO: 41, wherein said modified TetR(Z) protein binds a TetR(Z) operator sequence with greater affinity in the presence of tetracycline than in the absence of tetracycline. In particular aspects of this embodiment: the amino acid substitution at position 102 is histidine; the amino acid substitution at position 114 is selected from the group consisting of alanine, leucine, valine, proline, phenylalanine and tryptophan; the amino acid substitution at position 164 is selected from the group consisting of glycine, serine, threonine, cysteine, tyrosine, asparagine, and glutamine; the amino acid substitution at position 177 is selected from the group consisting of glycine, serine, threonine, cysteine, tyrosine, glutamine, and asparagine; the amino acid substitution at position 183 is selected from the group consisting of alanine, leucine, valine, proline, phenylalanine, and tryptophan; the amino acid substitution at position 194 is selected from the group consisting of glycine, serine, threonine, cysteine, tyrosine, asparagine, and glutamine; the amino acid substitutions are at positions 100 and 166, and the amino acid substitution at position 100 is arginine and the amino acid substitution at position 166 is leucine; the amino acid substitutions are at positions 100 and 166, and the amino acid substitution at position 100 is glutamic acid and the amino acid substitution at position 166 is leucine; the amino acid substitutions are at positions 100 and 177, and the amino acid substitution at position 100 is arginine and the amino acid substitution at position 177 is glutamine; the amino acid substitutions are at positions 100 and 177, and the amino acid substitution at position 100 is glutamic acid and the amino acid substitution at position 177 is glutamine; the amino acid substitutions are at positions 100 and 188, and the amino acid substitution at position 100 is arginine and the amino acid substitution at position 188 is glutamine; the amino acid substitutions are at positions 100 and 188, and the amino acid substitution at position 100 is glutamic acid and the amino acid substitution at position 188 is glutamine; the amino acid substitutions are at positions 100 and 114, and the amino acid substitution at position 100 is arginine and the amino acid substitution at position 114 is phenylalanine; the amino acid substitutions are at positions 100 and 114, and the amino acid substitution at position 100 is glutamic acid and the amino acid substitution at position 110 is phenylalanine; the amino acid substitutions are at positions 100 and 194, and the amino acid substitution at position 100 is arginine and the amino acid substitution at position 194 is serine; the amino acid substitutions are at positions 100 and 194, and the amino acid substitution at position 100 is glutamic acid and the amino acid substitution at position 194 is serine; the amino acid substitutions are at positions 103 and 183, and the amino acid substitution at position 100 is glutamic acid and the amino acid substitution at position 183 is valine; the amino acid substitutions are at positions 103 and 165, and the amino acid substitution at position 103 is glutamic acid and the amino acid substitution at position 165 is cysteine; the amino acid substitutions are at positions 100, 107, and 118, and the amino acid substitution at position 100 is arginine, the amino acid substitution at position 107 is serine, and the amino acid substitution at position 118 is valine; the amino acid substitutions are at positions 100, 107, and 118, and the amino acid substitution at position 100 is glutamic acid, the amino acid substitution at position 107 is serine, and the amino acid substitution at position 118 is valine; the amino acid substitutions are at positions 100, 164, and 189, and the amino acid substitution at position 100 is arginine, the amino acid substitution at position 164 is asparagine, and the amino acid substitution at position 189 is histidine; the amino acid substitutions are at positions 100, 164, and 189, and the amino acid substitution at position 100 is glutamic acid, the amino acid substitution at position 164 is serine, and the amino acid substitution at position 189 is histidine; the amino acid substitutions are at positions 63, 99, and 104, and the amino acid substitution at position 63 is asparagine, the amino acid substitution at position 99 is glutamic acid, and the amino acid substitution at position 104 is alanine; the amino acid substitution at position 59 is asparagine, the amino acid substitution at position 95 is glycine, and the amino acid substitution at position 100 is alanine; the amino acid substitutions are at positions 167, and 185, and the amino acid substitution at position 167 is valine and the amino acid substitution at position 185 is tryptophan; the amino acid substitutions are at positions 74, 95, and 103, and the amino acid substitution at position 74 is valine, the amino acid substitution at position 95 is glutamine, and the amino acid substitution at position 103 is glutamic acid; the amino acid substitutions are at positions 75, 99, and 137, and the amino acid substitution at position 75 is valine, the amino acid substitution at position 99 is glutamic acid, and the amino acid substitution at position 137 arginine; the amino acid substitution at position 71 is valine, the amino acid substitution at position 95 is arginine, and the amino acid substitution at position 137 arginine; the amino acid substitutions are at positions 63, 105, and 181, and the amino acid substitution at position 63 is asparagine, the amino acid substitution at position 105 is histidine, and the amino acid substitution at position 181 glycine.

[0145] In a further embodiment, the present invention is directed to a chimeric revTetR protein comprising an amino-terminal DNA-binding domain and a carboxy-terminal tetracycline-binding domain that comprises amino acid residues 50 to 205 of a modified TetR(A) protein comprising an amino acid substitution at a position selected from the group consisting of positions 59, 70, 71, 91, 95, 96, 99, 100, 101, 103, 114, 127, 158, 159, 160, 179, 193, 197, and 201 of the TetR(A) protein as depicted in SEQ ID NO: 34, wherein said modified TetR(A) protein binds a TetR(A) operator sequence with greater affinity in the presence of tetracycline than in the absence of tetracycline.

[0146] In a further embodiment, the present invention is directed to a chimeric revTetR protein comprising an amino-terminal DNA-binding domain and a carboxy-terminal tetracycline-binding domain that comprises amino acid residues 50 to 205 of a modified TetR(B) protein comprising an amino acid substitution at a position selected from the group consisting of positions 59, 70, 71, 91, 95, 96, 99, 100, 101, 103, 114, 127, 158, 159, 160, 178, 192, 196, and 200 of the TetR(B) protein as depicted in SEQ ID NO: 36, wherein said modified TetR(B) protein binds a TetR(B) operator sequence with greater affinity in the presence of tetracycline than in the absence of tetracycline.

[0147] In a further embodiment, the present invention is directed to a chimeric revTetR protein comprising an amino-terminal DNA-binding domain and a carboxy-terminal tetracycline-binding domain that comprises amino acid residues 50 to 205 of a modified TetR(C) protein comprising an amino acid substitution at a position selected from the group consisting of positions 59, 70, 71, 91, 95, 96, 99, 100, 101, 103, 114, 127, 158, 159, 164, 182, 196, 200, and 204 of the TetR(C) protein as depicted in SEQ ID NO: 38, wherein said modified TetR(C) protein binds a TetR(C) operator sequence with greater affinity in the presence of tetracycline than in the absence of tetracycline.

[0148] In a further embodiment, the present invention is directed to a chimeric revTetR protein comprising an amino-terminal DNA-binding domain and a carboxy-terminal tetracycline-binding domain that comprises amino acid residues 50 to 205 of a modified TetR(D) protein comprising an amino acid substitution at a position selected from the group consisting of positions 59, 70, 71, 91, 95, 96, 99, 100, 101, 103, 114, 127, 158, 159, 160, 178, 192, 196, and 200 of the TetR(D) protein as depicted in SEQ ID NO: 40, wherein said modified TetR(D) protein binds a TetR(D) operator sequence with greater affinity in the presence of tetracycline than in the absence of tetracycline.

[0149] In a further embodiment, the present invention is directed to a chimeric revTetR protein comprising an amino-terminal DNA-binding domain and a carboxy-terminal tetracycline-binding domain that comprises amino acid residues 50 to 205 of a modified TetR(E) protein comprising an amino acid substitution at a position selected from the group consisting of positions 59, 70, 71, 91, 95, 96, 99, 100, 101, 103, 114, 127, 158, 159, 160, 175, 189, 193, and 197 of the TetR(E) protein as depicted in SEQ ID NO: 42, wherein said modified TetR(E) protein binds a TetR(E) operator sequence with greater affinity in the presence of tetracycline than in the absence of tetracycline.

[0150] In a further embodiment, the present invention is directed to a chimeric revTetR protein comprising an amino-terminal DNA-binding domain and a carboxy-terminal tetracycline-binding domain that comprises amino acid residues 50 to 205 of a modified TetR(G) protein comprising an amino acid substitution at a position selected from the group consisting of positions 59, 70, 71, 91, 95, 96, 99, 100, 101, 103, 114, 127, 160, 161, 162, 180, 194, 198, and 202 of the TetR(G) protein as depicted in SEQ ID NO: 44, wherein said modified TetR(G) protein binds a TetR(G) operator sequence with greater affinity in the presence of tetracycline than in the absence of tetracycline.

[0151] In a further embodiment, the present invention is directed to a chimeric revTetR protein comprising an amino-terminal DNA-binding domain and a carboxy-terminal tetracycline-binding domain that comprises amino acid residues 50 to 205 of a modified TetR(H) protein comprising an amino acid substitution at a position selected from the group consisting of positions 59, 70, 71, 91, 95, 96, 99, 100, 101, 103, 114, 127, 158, 159, 160, 180, 194, 198, and 202 of the TetR(H) protein as depicted in SEQ ID NO: 46, wherein said modified TetR(H) protein binds a TetR(H) operator sequence with greater affinity in the presence of tetracycline than in the absence of tetracycline.

[0152] In a further embodiment, the present invention is directed to a chimeric revTetR protein comprising an amino-terminal DNA-binding domain and a carboxy-terminal tetracycline-binding domain that comprises amino acid residues 50 to 205 of a modified TetR(J) protein comprising an amino acid substitution at an amino acid position selected from the group consisting of positions 59, 70, 71, 91, 95, 96, 99, 100, 101, 103, 114, 127, 158, 159, 160, 180, 194, 198, and 202 of the TetR(J) protein as depicted in SEQ ID NO: 48, wherein said modified TetR(J) protein binds a TetR(J) operator sequence with greater affinity in the presence of tetracycline than in the absence of tetracycline.

[0153] In a further embodiment, the present invention is directed to a chimeric revTetR protein comprising an amino-terminal DNA-binding domain and a carboxy-terminal tetracycline-binding domain that comprises amino acid residues 50 to 205 of a modified TetR(Z) protein comprising an amino acid substitution at an amino acid position selected from the group consisting of positions 63, 74, 75, 95, 99, 100, 103, 104, 105, 107, 118, 137, 165, 166, 167, 181, 185, and 189 of the TetR(Z) protein as depicted in SEQ ID NO: 50, wherein said modified TetR(Z) protein binds a TetR(Z) operator sequence with greater affinity in the presence of tetracycline than in the absence of tetracycline.

[0154] In a further embodiment, the present invention is directed to a chimeric revTetR protein comprising an amino-terminal DNA-binding domain and a carboxy-terminal tetracycline-binding domain comprising, in which the DNA-binding domain comprises amino acid residues 25-40 of an amino acid sequence selected from the group of amino acid sequences depicted in SEQ ID NO: 34, 36, 38, 40, 42, 44, 46, 48, and 50.

[0155] In a still further embodiment, the present invention is directed to a chimeric revTetR protein comprising an amino-terminal DNA-binding domain and a carboxy-terminal tetracycline-binding domain comprising, in which the DNA-binding domain comprises amino acid residues 1-50 of an amino acid sequence selected from the group of amino acid sequences depicted in SEQ ID NO: 34, 36, 38, 40, 42, 44, 46, 48, and 50.

[0156] As one of skill in the art would recognize, the DNA sequence to which the chimeric tetracycline repressor protein will bind, for any given construct, will correspond to that DNA sequence recognized by the particular DNA binding domain of the selected TetR repressor protein or other DNA-binding protein that is incorporated into the chimera. Therefore, the DNA sequence bound by a chimeric tetracycline repressor protein of the present invention, can be, but is not limited to, a tet operator sequence corresponding to a Tet A, B, C, D, E, G, H, J, and Z operator sequence. Similarly, in other embodiments of the present invention, the chimeric revTetR protein may bind to sequence other than that of a tetO, including, without limitation, the O_{L} operator of bacteriophage λ where the DNA-binding domain of the chimeric revTetR is derived from the λ CI repressor, or the hixL and/or hixR binding sites where the DNA-binding domain of the chimeric revTetR is derived from the Hin recombinase protein.

[0157] Chimeric revTetR proteins therefore may comprise, in one embodiment, an amino terminal DNA binding domain derived from a recombinase selected from the group consisting of Hin, Gin, Cin, and Pin, fused to a carboxy-teraminal tetracycline binding domain of a revTetR protein selected from, but not limited to, the group consisting of a revTetR modified repressor of any one of TetR(A), TetR(B), TetR(C), TetR(D), TetR(E), TetR(G), TetR(H), TetR(J), and TetR(Z) classes. The DNA-binding domain of Hin comprises the 52 carboxy-terminal amino acids of that protein; the DNA-binding domain of Gin comprises the 56 carboxy-terminal amino acids of that protein; the DNA-binding domain of Cin comprises the 51 carboxy-terminal amino acids of that protein; and the DNA-binding domain of Pin comprises the 47 carboxy-terminal amino acids of that protein. The tetracycline -binding domain of a chimeric revTetR protein comprises a revTetR protein lacking the TetO DNA-binding domain, which includes about fifty amino-terminal amino acids. Recombinant genes expressing such chimeric revTetR proteins are prepared according to methods well known in the art, which encode a protein comprising about 50 amino terminal residues corresponding the carboxy terminus of a prokaryotic recombinase such as, but not limited to Hin, Cin, Gin, and Pin, fused to about 150 carboxy-terminal amino acids corresponding to a revTetR protein disclosed herein. As one of ordinary skill would appreciate, minor variations in the amino acid sequence of such chimeric revTetR proteins would be useful in maximizing, or minimizing the binding of such proteins to the sites recognized by the recombinases, i.e. the hixL and hixR sites bound by Hin, the gixL and gixR sites bound by Gin, the cinL and cinR sites bound by Cin, and the pixL and pixR sites bound by Pin recombinase (Feng et al. 1994, Science 263: 348-55). Moreover, one of ordinary skill would appreciate derivatives of such chimeric revTetR proteins having enhanced or diminished binding to one or more of the recombinase binding sites disclosed above, in the presence of tetracycline or a tetracycline analog, may be selected using the methods disclosed herein.

[0158] In a further embodiment, the present invention is directed toward chimeric revTetR proteins comprising DNA recognition segments or regions derived from a non-revTetR DNA binding protein combined with a tetracycline binding domain derived from a revTetR protein. In this embodiment, rather than combining an entire DNA-binding domain from a non-revTetR DNA binding protein with a tetracycline binding domain derived from a revTetR protein, only those residues or segments involved in DNA sequence recognition are used to construct the chimeric proteins. In one non-limiting example, a helix-turn-helix motif believed to be intimately involved in DNA sequence recognition by a non-revTetR DNA binding protein is used to replace e.g. the helix-turn-helix motif believed to be intimately involved in TetO recognition in a revTetR DNA binding protein. Chimeric DNA binding proteins constructed in this manner would bind DNA sequences other than a tet operator sequence and would still be subject to tet-regulation as described above. Suitable non-revTetR DNA binding proteins useful in this embodiment include, but are not limited to Hin, Gin, Cin, Pin, and the λ CI repressor protein.

[0159] In still another embodiment of the present invention, chimeric revTetR proteins as described above, which have altered DNA-binding traits and are capable of binding to DNA sequences other than a tet operator, are further modified and refined. Such optimization of DNA-binding properties for a particular purpose is carried out using mutagenesis procedures and screening methods as described herein as well as in the art.

[0160] 5.3 Characterization of Modified Repressors

[0161] The modified tetracycline repressors of the present invention are useful for regulating gene expression in a wide variety of prokaryotic organisms. While it is anticipated that each identified revTetR repressor will be broadly applicable across a number of organisms, it is possible that any given revTetR repressor may have slightly different activities from organism to organism, including little to undetectable activity. It is contemplated that one of skill in the art following the teachings provided herein will be able to determine the relative activity of any given revTetR repressor in view of the desired amount of regulation without undue experimentation.

[0162] As shown in FIG. 2 and Table 5, the exemplary revTetR repressors (e.g., those set forth in SEQ ID NOS.: 2, 4, 6, 8, 10, 12, 14, 16, 18, 20, 22, 24, 26, 28, 30, as well as representative examples selected from among those set forth in SEQ ID NOS.: 71-264) exhibit the reverse phenotype in a representative prokaryotic organism, Escherichia coli, compared to wild-type repressor, although the absolute level of non-repressed and repressed transcription varies amongst the revTetR repressors. The varied levels of transcriptional regulation advantageously increase the flexibility and range of repressed versus non-repressed levels of regulated gene product. By selecting the appropriate revTetR and tet sequence for use in the methods described herein, repressed and non-repressed levels of the regulated gene may be varied over a wide range as well as the overall ratio of induction.

[0163] The relative ratios of non-repressed to repressed levels of transcription for the collection of identified revTetR repressors range from about 1.4-fold to about 50-fold at 28° C. and from about 1.3-fold to 40-fold at 37° C. For example, modified revTetR repressors of the present invention comprising an amino acid substitution of arginine for glycine at position 96 (e.g., SEQ ID NO. 24) repress transcription 19-fold at 37° C. but only to a less extent at 28° C. (5.7-fold, Table 2). Furthermore, modified revTetR repressors of the present invention comprising the arginine for glycine substitution at position 96 and further comprising a substitution or substitutions of serine for threonine at position 103 and valine for glutamic acid at position 114 (e.g., SEQ ID NO. 2); leucine for proline at position 159 (e.g., SEQ ID NO. 6); or glutamine to histidine at position 188 (e.g., SEQ ID NO. 12) have pronouncedly different activities. For instance, the additional substitutions of serine for leucine at position 103 and valine for glutamic acid at position 114 completely abolishes the ability of these revTetR repressors to repress transcription in the presence of tetracycline or tetracycline analog at 37° C. while increasing repression at 28° C. by as much as 2-fold. Thus, the combination of the substitutions at positions 103 and 114 results in a revTetR repressor that is unable to effectively repress transcription at 37° C. demonstrating that the residues at these positions contribute to and/or modulate the reverse phenotype of revTetR repressors in prokaryotic organisms.

[0164] The revTetR repressors of the present invention are used to modulate transcription from a prokaryotic promoter operably associated with a tet operator within the range of from about 5° C. to about 60° C., from about 10° C. to about 55° C., from about 15° C. to about 50° C., from about 20° C. to about 45° C., from about 25° C. to about 40° C., an about 28° C. to about 37° C.

[0165] Similarly modified revTetR repressors of the present invention comprising an amino acid substitution at position 96 (glutamic acid for glycine) and further comprising a substitution serine for leucine at position 205 (e.g., SEQ ID NO. 14); or phenylalanine for tryptophan at position 110 (e.g., SEQ ID NO. 16) have varying activities. For instance, the resulting modified revTetR repressors have similar activities at 28° C. (36.3-fold v. 33.1-fold) but dramatically different activities at 37° C. (22-fold v. 5-fold). Therefore, the introduction of a substitution of phenylalanine for tryptophan at position 110 may be introduced by one of skill in the art to modulate the activity of the resulting modified revTetR repressor at 37° C., which may be helpful for designing temperature-specific reveTetR repressors (e.g., see Section 5.5.4.1.).

[0166] In addition, modified revTetR repressors of the present invention comprising an amino acid substitution of glutamic acid for valine at position 99 (SEQ ID NO. 26) repress transcription 41-fold at 37° C. and 18-fold at 28° C. Modified revTetR repressors of the present invention comprising the glutamic acid for valine at position 99 and further comprising a substitution or substitutions of valine for isoleucine at position 194 (e.g., SEQ ID NO. 18); cysteine for arginine at position 158 (e.g., SEQ ID NO. 20); or valine for alanine at position 70 and glutamine for leucine at position 91 (e.g., SEQ ID NO. 22) also have pronouncedly different activities. For instance, the additional substitution of cysteine for arginine at position 158 increases repression at 28° C. by 50% but reduces the level of repression 5-fold at 37° C. whereas the additional substitution of valine for isoleucine at position 194 increases repression at 28° C. by greater than 2.5-fold but reduces the level of repression 4-fold at 37° C.

[0167] Still further, modified revTetR repressors of the present invention comprising amino acid substitutions of asparagine for isoleucine for position 59, glutamic acid for aspartic acid at position 95, and alanine for histidine at position 100 (e.g., SEQ ID NO. 10) repressed transcription at 28° C. and 37° C to a similar extent as the modified revTetR repressors comprising amino acid substitutions arginine for glycine at position 96 and leucine for proline at position 159 (about 9-fold and 20-fold, respectively). In contrast, modified revTetR repressors of the present invention comprising the amino acid substitution of asparagine for isoleucine for position 59, but comprising different substitutions of arginine for lysine at position 98, histidine for leucine at position 101 and glycine for serine at position 192 (e.g., SEQ ID NO. 30) and, valine for alanine at position 71, glycine (GGC) for aspartic acid at position 95, and arginine for leucine at position 127 (e.g., SEQ ID NO. 28) virtually eliminated repression at 28° C. Modified revTetR repressors of the present invention that have substitutions of valine for alanine at position 160, valine for aspartic acid at position 178, tryptophan for glycine at position 196 (e.g., SEQ ID NO. 8) have greatly reduced levels of transcription at 28° C. in the presence or absence of tetracycline or tetracycline analog but relatively wild-type levels of transcription at 37° C., though the ratio of non-repressed to repressed levels of transcription is substantially lower than that of wild-type TetR.

[0168] Therefore, one of skill in the art can introduce similar mutations at the corresponding positions in the other classes of tetracycline repressor, or chimera, thereof, based on the teachings herein and the amino acid sequences of the positions provided in Table 3 to generate revTetR repressors in these classes that are useful in the methods described herein.

[0169] 5.3.1 Temperature-Specific RevTetR Repressors

[0170] Modified revTetR proteins that exhibit the reverse phenotype in prokaryotes only at particular temperatures, e.g., exhibit the reverse phenotype only at 28° C. or 37° C., but not both, are also provided. In addition to the revTetR mutations described above that confer a reverse phenotype only at 28° C. (e.g., SEQ ID NO. 2), a substitution at position 96 and additional substitutions of aspargine for aspartic acid at position 157 and histidine for glutamine at position 200 (e.g., SEQ ID NO. 4) also completely eliminate repression at 37° C. resulting in a modified revTetR proteins that exhibit the reverse phenotype in prokaryotes only at 28° C. (See Table 2, FIG. 2).

[0171] Conversely, modified revTetR repressors that exhibit the reverse phenotype in prokaryotes only at 37° C. are also provided. For example, modified revTetR repressors comprising amino acid substitutions of asparagine for leucine at position 59, arginine for lysine at position 98, histidine for leucine at position 101 and glycine for serine at position 192 (e.g., SEQ ID NO. 30) and valine for alanine at position 71, glycine (GGC) for aspartic acid at position 95, and arginine for leucine at position 127 (e.g., SEQ ID NO. 28) fail to repress transcription at 28° C.

[0172] Therefore, one of skill in the art can introduce similar mutations at the corresponding positions in the other classes of tetracycline repressor, or chimera, thereof, based on the teachings herein and the amino acid sequences of the positions provided in Table 2 to generate temperature-specific revTetR repressors in these classes that are useful in the methods described herein. These temperature-specific revTetR repressors are particularly useful for determining and validating gene products essential for cellular proliferation by comparing expression of the target gene product regulated by the temperature-specific revTetR repressor at repressing and non-repressing conditions.

[0173] The tet-regulated expression systems disclosed herein, which comprise at least one revTetR DNA-binding protein, are particularly advantageous in that they enable regulation of gene expression by exposure of the prokaryotic cell to tetracyline, which acts as a co-repressor. Tetracycline is inexpensive, readily penetrates prokaryotic cells, and is used in the present context only at very low, non-antibiotic, levels. Moreover, there are a number of tetracycline analogs available and some, including but not limited to anhydrotetracycline, not only have a greater affinity for TetR, but also are less active as antibiotics. The revTetR-regulated gene expression systems disclosed herein can be established in essentially any prokaryotic cell using an endogenous promoter, where wild-type levels of gene expression are generally maintained in the absence of tetracycline or an analogue thereof.

[0174] 5.4 Antibodies to Modified Repressors

[0175] Described herein are methods for the production of antibodies capable of specifically recognizing epitopes of one or more of the revTetR proteins described above. Such antibodies can include, but are not limited to, polyclonal antibodies, monoclonal antibodies (mAbs), human, humanized or chimeric antibodies, single chain antibodies, Fab fragments, F(ab′)₂ fragments, fragments produced by a Fab expression library, anti-idiotypic (anti-Id) antibodies, and epitope-binding fragments of any of the above.

[0176] It is presumed that a number of the modified revTetR repressors of the present invention will have a conformation that is different from that of wild-type TetR. For the production of antibodies to the altered conformation of the revTetR repressors, various host animals can be immunized by injection with a revTetR protein, or a portion thereof containing one of the amino acid substitutions set forth herein. Such host animals can include but are not limited to rabbits, mice, and rats, to name but a few. Various adjuvants can be used to increase the immunological response, depending on the host species, including but not limited to Freund's (complete and incomplete), mineral gels such as aluminum hydroxide, surface active substances such as lysolecithin, pluronic polyols, polyanions, peptides, oil emulsions, keyhole limpet hemocyanin, dinitrophenol, and potentially useful human adjuvants such as BCG (bacille Calmette-Guerin) and Corynebacterium parvum. Accordingly, a method of eliciting an immune response in an animal, comprising introducing into the animal an immunogenic composition comprising an isolated revTetR polypeptide, the amino acid sequence of which comprises at least one revTetR substitution and 9 consecutive residues of one of SEQ ID NO: 2, 4, 6, 8, 10, 12, 14, 16, 18, 20, 22, 24, 26, 28, 30, and 71-264.

[0177] Polyclonal antibodies are heterogeneous populations of antibody molecules derived from the sera of animals immunized with an antigen, such as a revTetR repressor polypeptide, or an antigenic functional derivative thereof containing one of the amino acid substitutions set forth herein are provided. For the production of polyclonal antibodies, host animals such as those described above, can be immunized by injection with a revTetR repressor polypeptide supplemented with adjuvants as also described above. The antibody titer in the immunized animal can be monitored over time by standard techniques, such as with an enzyme linked immunosorbent assay (ELISA) using immobilized polypeptide. If desired, the antibody molecules can be isolated from the animal (e.g., from the blood) and further purified by well-known techniques, such as protein A chromatography to obtain the IgG fraction.

[0178] Monoclonal antibodies, which are homogeneous populations of antibodies to a particular antigen, can be obtained by any technique that provides for the production of antibody molecules by continuous cell lines in culture. These include, but are not limited to the hybridoma technique of Kohler and Milstein, (1975, Nature 256: 495-97; and U.S. Pat. No. 4,376,110), the human B-cell hybridoma technique (Kosbor et al., 1983, Immunology Today 4:72; Cole et al., 1983, Proc. Natl. Acad. Sci. USA 80: 2026-30), and the EBV-hybridoma technique (Cole et al., 1985, Monoclonal Antibodies And Cancer Therapy, Alan R. Liss, Inc., pp. 77-96). Such antibodies can be of any immunoglobulin class including IgG, IgM, IgE, IgA, IgD and any subclass thereof. The hybridoma producing the mAb of this invention can be cultivated in vitro or in vivo. Production of high titers of mAbs in vivo makes this the presently preferred method of production.

[0179] Alternative to preparing monoclonal antibody-secreting hybridomas, a monoclonal antibody directed against a revTetR polypeptide of the invention can be identified and isolated by screening a recombinant combinatorial immunoglobulin library (e.g., an antibody phage display library) with the polypeptide of interest. Kits for generating and screening phage display libraries are commercially available (e.g., the Pharmacia Recombinant Phage Antibody System, Catalog No. 27-9400-01; and the Stratagene SurfZAP J Phage Display Kit, Catalog No. 240612). Additionally, examples of methods and reagents particularly amenable for use in generating and screening antibody display library can be found in, for example, U.S. Pat. No. 5,223,409; PCT Publication No. WO 92/18619; PCT Publication No. WO 91/17271; PCT Publication No. WO 92/20791; PCT Publication No. WO 92/15679; PCT Publication No. WO 93/01288; PCT Publication No. WO 92/01047; PCT Publication No. WO 92/09690; PCT Publication No. WO 90/02809; Fuchs et al. (1991) Bio/Technology 9:1370-1372; Hay et al. (1992) Hum. Antibod. Hybridomas 3:81-85; Huse et al. (1989) Science 246:1275-1281; Griffiths et al. (1993) EMBO J. 12:725-734.

[0180] Additionally, recombinant antibodies, such as chimeric and humanized monoclonal antibodies, comprising both human and non-human portions, which can be made using standard recombinant DNA techniques, are within the scope of the invention. A chimeric antibody is a molecule in which different portions are derived from different animal species, such as those having a variable region derived from a murine mAb and a human immunoglobulin constant region. (See, e.g., Cabilly et al., U.S. Pat. No. 4,816,567; and Boss et al., U.S. Pat. No. 4,816397, which are incorporated herein by reference in their entirety.) Humanized antibodies are antibody molecules from non-human species having one or more complementarily determining regions (CDRs) from the non-human species and a framework region from a human immunoglobulin molecule. (See, e.g., Queen, U.S. Pat. No. 5,585,089, which is incorporated herein by reference in its entirety.) Such chimeric and humanized monoclonal antibodies can be produced by recombinant DNA techniques known in the art, for example using methods described in PCT Publication No. WO 87/02671; European Patent Application 184,187; European Patent Application 171,496; European Patent Application 173,494; PCT Publication No. WO 86/01533; U.S. Pat. No. 4,816,567; European Patent Application 125,023; Better et al. (1988) Science 240:1041-1043; Liu et al. (1987) Proc. Natl. Acad. Sci. USA 84:3439-3443; Liu et al. (1987) J Immunol. 139:3521-3526; Sun et al. (1987) Proc. Natl. Acad. Sci. USA 84:214-218; Nishimura et al. (1987) Canc. Res. 47:999-1005; Wood et al. (1985) Nature 314:446-449; and Shaw et al. (1988) J. Natl. Cancer Inst. 80:1553-1559); Morrison (1985) Science 229:1202-1207; Oi et al. (1986) Bio/Techniques 4:214; U.S. Pat. No. 5,225,539; Jones et al. (1986) Nature 321:552-525; Verhoeyan et al. (1988) Science 239:1534; and Beidler et al. (1988) J. Immunol. 141:4053-4060.

[0181] Completely human antibodies are particularly desirable for therapeutic treatment of human patients. Such antibodies can be produced using transgenic mice which are incapable of expressing endogenous immunoglobulin heavy and light chains genes, but which can express human heavy and light chain genes. The transgenic mice are immunized in the normal fashion with a selected antigen, e.g., all or a portion of a polypeptide of the invention. Monoclonal antibodies directed against the antigen can be obtained using conventional hybridoma technology. The human immunoglobulin transgenes harbored by the transgenic mice rearrange during B cell differentiation, and subsequently undergo class switching and somatic mutation. Thus, using such a technique, it is possible to produce therapeutically useful IgG, IgA and IgE antibodies. For an overview of this technology for producing human antibodies, see Lonberg and Huszar (1995, Int. Rev. Immunol. 13:65-93). For a detailed discussion of this technology for producing human antibodies and human monoclonal antibodies and protocols for producing such antibodies, see, e.g., U.S. Pat. 5,625,126; U.S. Pat. No. 5,633,425; U.S. Pat. No. 5,569,825; U.S. Pat. No. 5,661,016; and U.S. Pat. No. 5,545,806.

[0182] Completely human antibodies which recognize a selected epitope can be generated using a technique referred to as “guided selection.” In this approach a selected non-human monoclonal antibody, e.g., a mouse antibody, is used to guide the selection of a completely human antibody recognizing the same epitope. (Jespers et al. (1994) Bio/technology 12:899-903). For example, human antibodies specific to epitopes responsible for the reverse phenotype of these repressors would be highly desirable for monitoring revTetR in vivo expression levels.

[0183] Antibody fragments which recognize specific epitopes can be generated by known techniques. For example, such fragments include but are not limited to: the F(ab′)₂ fragments which can be produced by pepsin digestion of the antibody molecule and the Fab fragments which can be generated by reducing the disulfide bridges of the F(ab′)₂ fragments. Alternatively, Fab expression libraries can be constructed (Huse et al., 1989, Science 246:1275-1281) to allow rapid and easy identification of monoclonal Fab fragments with the desired specificity.

[0184] Antibodies provided herein may also be described or specified in terms of their binding affinity to a target gene product. Preferred binding affinities include those with a dissociation constant or K_{d} less than 5×10⁻⁶M, 10⁻⁶M, 5×10⁻⁷M, 10⁻⁷M, 5×10⁻⁸M, 10⁻⁸M, 5×10⁻⁹M, 10⁻⁹M, 5×10⁻¹⁰M, 10⁻¹⁰M, 5×10⁻¹¹M, 10⁻¹¹M, 5×10⁻¹²M, 10⁻¹²M, 5×10⁻¹³M, 10⁻¹³M, 5×10⁻¹⁴M, 10⁻¹⁴M, 5×10⁻¹⁵M, or 10⁻¹⁵M.

[0185] Antibodies directed against a revTetR repressor polypeptide or fragment thereof containing one of the amino acid substitutions set forth herein can be used diagnostically to monitor levels of a revTetR repressor polypeptide in the tissue of an host as part of a clinical testing procedure, e.g., to, for example, determine the efficacy of a given treatment regimen. Detection can be facilitated by coupling the antibody to a detectable substance. Examples of detectable substances include various enzymes, prosthetic groups, fluorescent materials, luminescent materials, bioluminescent materials, and radioactive materials. Examples of suitable enzymes include horseradish peroxidase, alkaline phosphatase, beta-galactosidase, or acetylcholinesterase; examples of suitable prosthetic group complexes include streptavidin/biotin and avidin/biotin; examples of suitable fluorescent materials include umbelliferone, fluorescein, fluorescein isothiocyanate, rhodamine, dichlorotriazinylamine fluorescein, dansyl chloride or phycoerythrin; an example of a luminescent material includes luminol; examples of bioluminescent materials include luciferase, luciferin, and aequorin, and examples of suitable radioactive material include ¹²⁵I, ¹³¹I, ³⁵S or ³H.

[0186] 5.5 Nucleic Acids Encoding Modified Repressors

[0187] Described herein are nucleic acids of the invention which encode the modified tetracycline repressors and chimeric tetracycline repressors of the invention, such as those described in Section 5.2.

[0188] In one embodiment, the isolated nucleic acids of the invention comprise nucleotide substitutions that result in codon changes in the TetR (BD) chimera (SEQ ID NO. 32) at amino acid positions 96 or 99, or at positions 96, 103 and 114; positions 96, 157 and 200; positions 96 and 159; positions 160, 178, 196; positions 59, 95 and 100; positions 96 and 188; positions 96 and 205; positions 96 and 110; positions 99 and 194; positions 99 and 158; positions 70, 91 and 99; positions 71, 95 and 127; positions 59, 98, 101 and 192. These nucleic acids encode modified tetracycline repressors that display the reverse phenotype. These nucleic acids can be prepared by modifying a nucleotide sequence that encode the TetR (BD) chimera, such as the nucleotide sequence set forth in SEQ ID NO: 31. The relative activity of these exemplary revTetR repressors encoded by the nucleotide sequences of the invention and wild type TetR repressor at two different assay temperatures is illustrated in FIG. 2, and discussed in detail in Section 5.5.

[0189] In particular embodiments, the nucleotide substitution that confers a reverse phenotype in prokaryotic organisms is a change of the glycine codon (GGG) to an arginine codon (AGG) at position 96 (e.g., SEQ ID NO. 23). In addition, isolated nucleic acids comprising the glycine to arginine codon substitution at position 96 and which further comprise codon changes of threonine (ACG) to serine (TCG) at position 103 and glutamic acid (GAA) to valine (GTA) at position 114 (e.g., SEQ ID NO. 1); proline (CCT) to leucine (CTT) at position 159 (e.g., SEQ ID NO. 5); or histidine (CAT) to glutamine (CAA) at position 188 (e.g., SEQ ID NO. 11).

[0190] In another embodiment, the nucleotide substitutions that confer a reverse phenotype in prokaryotic organisms are changes of the glycine codon (GGG) to a glutamic acid codon (GAG) at position 96 and which further comprises nucleotide substitutions resulting in codon changes of aspartic acid (GAC) to aspargine (AAC) at position 157 and glutamine (CAG) to histidine (CAT) at position 200 (e.g., SEQ ID NO. 3); leucine (TTG) to serine (TCG) at position 205 (e.g., SEQ ID NO. 13); or tryptophan (TAT) to phenylalanine (TTT) at position 110 (e.g., SEQ ID NO. 15).

[0191] In yet another embodiment, the nucleotide substitution that confers a reverse phenotype in prokaryotic organisms is a change of the valine codon (GTG) to a glutamic acid codon (GAG) at position 99 (e.g., SEQ ID NO. 25). In addition, isolated nucleic acids were identified comprising the valine to glutamic acid codon substitution at position 99 and which further comprise nucleotide substitutions that result in codon changes of isoleucine (ATC) to valine (GTC) at position 194 (e.g., SEQ ID NO. 17); arginine (CGC) to cysteine (TGC) at position 158 (e.g., SEQ ID NO. 19); or alanine (GCG) to valine (GTG) at position 70 and leucine (CTG) to glutamine (CAG) at position 91 (e.g., SEQ ID NO. 21).

[0192] Furthermore, isolated nucleic acids were identified comprising nucleotide sequences having nucleotide substitutions that result in codon changes of: isoleucine (ATC) to asparagine (AAC) at position 59, aspartic acid (GAC) to glutamic acid (GAA) at position 95, and histidine (CAC) to alanine (GCT) at position 100 (e.g., SEQ ID NO. 9); isoleucine (ATC) to asparagine (AAC) at position 59, lysine (AAA) to arginine (AGA) at position 98, leucine (CTC) to histidine (CAC) at position 101 and serine (AGC) to glycine (GGC) at position 192 (e.g., SEQ ID NO. 29); alanine (GCA) to valine (GTA) at position 160, aspartic acid (GAC) to valine (GTC) at position 178, and glycine (GGG) to tryptophan (TGG) at position 196 (e.g., SEQ ID NO. 7); and, alanine (GCG) to valine (GTG) at position 71, aspartic acid (GAC) to glycine (GGC) at position 95, and leucine (CTG) to arginine (CGG) at position 127 (e.g., SEQ ID NO. 27).

[0193] In other preferred embodiments, the isolated nucleic acids comprise a nucleotide sequence that encodes any of the amino acid sequences set forth in SEQ ID NOS. 2, 4, 6, 8, 10, 12, 14, 16, 18, 20, 22, 24, 26, 28, 30, and 71-264. In further embodiments, the isolated nucleic acids comprise the sequence of nucleotides selected from the group consisting of SEQ ID NOS. 1, 3, 5, 7, 9, 11, 13, 15, 17, 19, 21, 23, 25, 27, 29, and 265-458. In other embodiments, the isolated nucleic acids comprise a nucleotide sequence encoding modified revTetR proteins that exhibit the reverse phenotype in prokaryotes only at particular temperatures, e.g., exhibit the reverse phenotype only at 28° C. or 37° C., but not both.

[0194] Minor nucleotide substitutions corresponding to regions of the polypeptide coding sequence that are not involved in the reverse phenotype may be introduced without compromising the reverse phenotype and are encompassed within the scope of the invention. For instance, nucleotide substitutions were identified in the revTetR coding region of a number of isolated nucleic acids that did not result in a codon change or alter the reverse phenotype (i.e., a silent mutation), for example, the arginine codon (CGT to CGC) at position 62 (e.g., SEQ ID NO. 29), the serine codon (TCC to TCT) at position 74 (SEQ ID NO. 11), the asparagine codon (AAT to AAC) at position 82, the arginine codon (CGC to CGT) at position 87 (e.g., SEQ ID NO. 5), the valine codon (GTG to GTC) at position 99 (e.g., SEQ ID NO. 9), the proline codon at position 105 (CCT to CCC), and the glycine codon (GGG to GGT) at position 130 (e.g., SEQ ID NO. 27). Accordingly, one of skill in the art based on the teachings and guidance provided herein would be readily able to identify those nucleotide sequences encoding a revTetR repressor comprising minor nucleotide substitutions that do not alter or substantially alter the amino acid sequence of one of the exemplary revTetR repressors.

[0195] To isolate homologous revTetR repressors, the revTetR nucleotide sequences and fragments thereof described above can be labeled and used as probes to screen a library of DNA encoding mutant TetR sequences. Hybridization conditions should be of a lower stringency when the cDNA library was derived from a Tet repressor class or chimera different from the class of TetR from which the labeled sequence was derived. For guidance regarding such conditions see, for example, Sambrook et al., 1989, Molecular Cloning, A Laboratory Manual, Cold Spring Harbor Press, N.Y.; and Ausubel et al., 1989, Current Protocols in Molecular Biology, (Green Publishing Associates and Wiley Interscience, N.Y.). In particular, oligonucleotide probes, primers or fragments that comprise nucleotide sequences encompassing the specified nucleotide substitutions described above that confer the reverse phenotype in one class of tetracycline repressor may be used in hybridization reactions or DNA amplification methods to specifically identify those members of the library containing the desired substitutions.

[0196] Alternatively, a modified revTetR repressor can be created by site-directed mutagenesis by substitution of amino acid residues in the sequence of a wild type Tet repressor, or chimera thereof. Tables 1 and 3 lists the positions of amino acid residues present in various tetracycline repressor classes at which desirable substitutions can be made, while Table 4 provides the position (column 1) and the amino acid residue found at that position (column 2) for the hybrid TetR(BD) protein in which specific revTetR alleles were identified. The remaining columns provide the amino acid found in the corresponding position for TetR(A), TetR(B), TetR(C), TetR(D), TetR(E), TetR(G), TetR(H), TetR(J), and TetR(Z), in which each residue identical to that found in TetR(BD) is presented in bold.

TABLE 4
Amino acid residues of TetR repressors

| AA | TetR | TetR | TetR | TetR | TetR | TetR | TetR | TetR | TetR | TetR |
|---|---|---|---|---|---|---|---|---|---|---|
| Position | (BD) | (A) | (B) | (C) | (D) | (E) | (G) | (H) | (J) | (Z) |
| 59 | Ile | Met | Met | Met | Ile | Ile | Ile | Met | Ile | Val |
| 70 | Ala | Arg | Leu | Arg | Ala | Leu | Glu | Leu | Leu | Glu |
| 71 | Ala | Ala | Glu | Asp | Ala | Glu | Glu | Pro | Ala | Ser |
| 91 | Leu | Leu | Leu | Leu | Leu | Leu | Leu | Leu | Leu | His |
| 95 | Asp | Asp | Asp | Asp | Asp | Asp | Asp | Asp | Asp | Asp |
| 96 | Gly | Gly | Gly | Gly | Gly | Gly | Gly | Gly | Gly | Gly |
| 98 | Lys | Arg | Lys | Arg | Lys | Arg | Arg | Lys | Lys | Arg |
| 99 | Val | Ile | Val | Ile | Val | Ile | Ile | Ile | Ile | Leu |
| 100 | His | His | His | His | His | His | His | His | His | His |
| 101 | Leu | Ala | Leu | Ala | Leu | Ile | Ala | Ala | Ala | Ala |
| 103 | Thr | Thr | Thr | Thr | Thr | Thr | Thr | Thr | Thr | His |
| 110 | Tyr | Met | Tyr | Met | Tyr | Phe | Phe | Phe | Phe | Asp |
| 114 | Glu | Asp | Glu | Asp | Glu | Glu | Glu | Glu | Glu | Glu |
| 127 | Leu | Ala | Leu | Ala | Leu | Val | Pro | Leu | Leu | Glu |
| 157 | Asp | Glu | Glu | Glu | Asp | Glu | Asp | Glu | Glu | Gly |
| 158 | Arg | Arg | Arg | Arg | Arg | His | Arg | Arg | Arg | Asn |
| 159 | Pro | Gly | Glu | Gly | Pro | Val | Pro | Glu | Glu | Ala |
| 160 | Ala | Thr | Thr | Thr | Ala | Ile | Asp | Lys | Lys | Ser |
| 178 | Asp | Asp | Asp | Tyr | Asp | Ala | Glu | Asp | Asp | None |
| 188 | His | Gln | Phe | Arg | His | Phe | Phe | Phe | Phe | Phe |
| 192 | Ser | Val | Leu | Leu | Ser | Ser | Ser | Val | Val | Ala |
| 196 | Gly | Gly | Gly | Gly | Gly | Gly | Gly | Gly | Gly | Gly |
| 200 | Gln | Arg | Gln | Met | Gln | Gln | Leu | Val | Val | Ser |
| 205 | Leu | Arg | Ser | Arg | Leu | Leu | Leu | His | Lys | Leu |

[0197] In still further embodiments, the isolated nucleic acid molecules encode a revTetR repressor comprising a sequence of nucleotides containing a mutation or mutations that confers a reverse phenotype in prokaryotic organisms and preferably having at least 70%, 75%, 80%, 85%, 90%, 95%, 98% or 99% nucleotide sequence identity, more preferably at least 90%, 95%, 98% or 99% sequence identity, to any of the nucleotide sequences set forth in SEQ ID NOS. 1, 3, 5, 7, 9, 11, 13, 15, 17, 19, 21, 23, 25, 27, 29, and 265-458. To determine the percent identity of two sequences, e.g., nucleotide or amino acid, the sequences are aligned for optimal comparison purposes (e.g., gaps can be introduced in the sequence of a first amino acid or nucleotide sequence for optimal alignment with a second amino acid or nucleotide sequence). The amino acid residues or nucleotides at corresponding amino acid positions or nucleotide positions are then compared. When a position in the first sequence is occupied by the same amino acid residue or nucleotide as the corresponding position in the second sequence, then the molecules are identical at that position. The percent identity between the two sequences is a function of the number of identical positions shared by the sequences (i.e., % identity=number of identical overlapping positions/total number of positions×100%). In one embodiment, the two sequences are the same length.

[0198] The determination of percent identity between two sequences can also be accomplished using a mathematical algorithm. A preferred, non-limiting example of a mathematical algorithm utilized for the comparison of two sequences is the algorithm of Karlin and Altschul (1990) Proc. Natl. Acad. Sci. U.S.A. 87: 2264-68, modified as in Karlin and Altschul (1993) Proc. Natl. Acad. Sci. U.S.A. 90: 5873-77. Such an algorithm is incorporated into the NBLAST and XBLAST programs of Altschul et al., 1990, J. Mol. Biol. 215: 403. BLAST nucleotide searches can be performed with the NBLAST nucleotide program parameters set, e.g., for score=100, wordlength=12 to obtain nucleotide sequences homologous to a nucleic acid molecules of the present invention. BLAST protein searches can be performed with the XBLAST program parameters set, e.g., to score-50, wordlength=3 to obtain amino acid sequences homologous to a protein molecule of the present invention. To obtain gapped alignments for comparison purposes, Gapped BLAST can be utilized as described in Altschul et al., 1997, Nucleic Acids Res. 25: 3389-3402. Alternatively, PSI-BLAST can be used to perform an iterated search which detects distant relationships between molecules (Id.). When utilizing BLAST, Gapped BLAST, and PSI-Blast programs, the default parameters of the respective programs (e.g., of XBLAST and NBLAST) can be used (see, e.g., http://www.ncbi.nlm.nih.gov). Another preferred, non-limiting example of a mathematical algorithm utilized for the comparison of sequences is the algorithm of Myers and Miller, (1988) CABIOS 4: 11-17. Such an algorithm is incorporated in the ALIGN program (version 2.0) which is part of the GCG sequence alignment software package. When utilizing the ALIGN program for comparing amino acid sequences, a PAM120 weight residue table, a gap length penalty of 12, and a gap penalty of 4 can be used.

[0199] The present invention also includes polynucleotides, preferably DNA molecules, that hybridize to the complement of the nucleic acid sequences encoding the modified tetracycline repressors. Such hybridization conditions can be highly stringent or less highly stringent, as described above and known in the art. The nucleic acid molecules of the invention that hybridize to the above described DNA sequences include oligodeoxynucleotides (“oligos”) which hybridize to the nucleotide sequence encoding the revTetR repressor under highly stringent or stringent conditions. In general, for oligos between 14 and 70 nucleotides in length the melting temperature (Tm) is calculated using the formula:

Tm(° C.)=81.5+16.6 (log[monovalent cations (molar)]+0.41 (% G+C)−(500/N)

[0200] where N is the length of the probe. If the hybridization is carried out in a solution containing formamide, the melting temperature may be calculated using the equation:

Tm(° C.)=81.5+16.6 (log[monovalent cations (molar)])+0.41 (% G+C)−(0.61) (% formamide)−(500/N)

[0201] where N is the length of the probe. In general, hybridization is carried out at about 20-25 degrees below Tm (for DNA-DNA hybrids) or about 10-15 degrees below Tm (for RNA-DNA hybrids). Other exemplary highly stringent conditions may refer, e.g., to washing in 6×SSC/0.05% sodium pyrophosphate at 37° C. (for 14-base oligos), 48° C. (for 17-base oligos), 55° C. (for 20-base oligos), and 60° C. (for 23-base oligos).

[0202] In one embodiment, the isolated nucleic acid molecules comprise a sequence of nucleotides containing a revTetR mutation or mutations that hybridize under moderate stringency conditions to the entire length any of the nucleotide sequences set forth in SEQ ID NOS. 1, 3, 5, 7, 9, 11, 13, 15, 17, 19, 21, 23, 25, 27, 29, and 265-458. In still yet another embodiment, the isolated nucleic acid molecules comprise a sequence of nucleotides containing a revTetR mutation or mutations that hybridize under high stringency conditions to the entire length of any of the nucleotide sequences set forth in SEQ ID NOS. 1, 3, 5, 7, 9, 11, 13, 15, 17, 19, 21, 23, 25, 27, 29, and 265-458 are provided. Isolated nucleic acids encoding a full-length complement of the nucleotide sequence any of these nucleic acids are also provided.

[0203] In another embodiment, isolated nucleic acid fragments of the revTetR repressor proteins comprising at least 10, 15, 20, 25, 30, 35, 40, 45 or 50 contiguous nucleotides containing at least one mutation encoding conferring a reverse phenotype in prokaryotes, or the complement thereof, are also provided. Particularly preferred nucleic acid fragments are those containing at least one mutation conferring a reverse phenotype in prokaryotic organisms located within nucleotides 210-216, 273 to 309, 330-381, 450-477, or 480 to 605 of SEQ ID NO. 31. Additional nucleic acid fragments are those containing at least one mutation conferring a reverse phenotype in prokaryotic organisms within nucleotide positions 37-75, 40-72, 49-69, 157-183, and 283-297 of SEQ ID NO: 31.

[0204] In another embodiment, the invention also encompasses (a) DNA vectors that comprise a nucleotide sequence comprising any of the foregoing sequences encoding a revTetR and/or their complements (including antisense molecules); (b) DNA expression constructs that comprise a nucleotide sequence comprising any of the foregoing sequences encoding a revTetR operably linked with a regulatory element that directs the expression of the coding sequences; and (c) genetically engineered host cells that comprise any of the foregoing sequences of the revTetR gene, including the revTetR gene operably linked with a regulatory element that directs the expression of the coding sequences in the host cells.

[0205] Recombinant DNA methods which are well known to those skilled in the art can be used to construct vectors comprising nucleotide sequences encoding a revTetR, and appropriate transcriptional/translational control signals. The various sequences may be joined in accordance with known techniques, such as restriction, joining complementary restriction sites and ligating, blunt ending by filling in overhangs and blunt ligation, Bal31 resection, primer repair, in vitro mutagenesis, or the like. Polylinkers and adapters may be employed, when appropriate, and introduced or removed by known techniques to allow for ease of assembly of the DNA vectors and expression constructs. These methods may also include in vivo recombination/genetic recombination. At each stage of the manipulation of the enzyme gene sequences, the fragment(s) may be cloned, analyzed by restriction enzyme, sequencing or hybridization, or the like. A large number of vectors are available for cloning and genetic manipulation. Normally, cloning can be performed in E. coli. See, for example, the techniques described in Sambrook et al., 1989, Molecular Cloning: A Laboratory Manual, Cold Spring Harbor Press, Cold Spring Harbor, N.Y.; Ausubel, 1989, supra; Methods in Enzymology: Guide to Molecular Cloning Techniques, Academic Press, Berger, S. L. and A. R. Kimmel eds., 1987; Pla et al., Yeast 12:1677-1702 (1996); Kinghorn and Unkles in Aspergillus, ed. by J. E. Smith, Plenum Press, New York, 1994, Chapter 4, p.65-100; which are incorporated by reference herein in their entireties.

[0206] In various embodiments of the invention, DNA vectors that comprise a nucleotide sequence encoding a revTetR of the invention, may further comprise replication functions that enable the transfer, maintenance and propagation of the DNA vectors in one or more species of host cells, including but not limited to E. coli cells, Gram positive bacteria, and Gram negative bacteria. The choice of the vector will typically depend on the compatibility of the vector with the host cell into which the vector is to be introduced. The vectors may be linear or closed circular plasmids, cosmid, or phagemids. The vector may be an autonomously replicating vector, i.e., a vector which exists as an extrachromosomal entity, the replication of which is independent of chromosomal replication, e.g., a plasmid, an extrachromosomal element, a minichromosome, or an artificial chromosome. The vector may contain any means for assuring self-replication. Alternatively, the vector may be one which, when introduced into the host cell, is integrated into the genome and replicated together with the chromosome(s) into which it has been integrated.

[0207] In specific embodiments of the present invention, expression of a revTetR-encoding gene is modulated so as to provide different levels of revTetR protein in a particular host. The level of expression of a gene encoding a particular revTetR protein may be manipulated by the choice of promoters with different transcription rates to which the revTetR coding sequence is operably associated, the inclusion of one or more positive and/or negative regulatory sequences which control the rate of transcription from that promoter, and the copy number of the vector carrying the revTetR coding sequence. Representative, but not limiting examples of each of these elements is provided supra. Therefore, by manipulating each of these elements independently or in a concerted manner, the level of a revTetR protein within the prokaryotic host cell can be precisely established over a wide range.

[0208] 5.5.1 Identification of Modified Tetracycline Repressors

[0209] Isolated nucleic acids of the present invention comprising nucleotide sequences encoding modified tetracycline repressors that exhibit the desired reverse phenotype in prokaryotic organisms may be identified, for example, from amongst a collection of mutated wild type tetracycline repressors using a number of in vitro or cell-based screening techniques, including those described herein. Any method known to those of skill in the art may be used to introduce nucleotide substitutions into the coding sequence of gene encoding a tetracycline repressor protein to create the pool of mutated repressors or portions thereof comprising at least one substitution including, but not limited to, spontaneous mutations, error-prone PCR (Leung et al., (1989) Technique 1: 11-15), chemical mutagenesis (Eckert et al., Mutat. Res. (1987) 178: 1-10), site-directed mutagenesis (Kunkel (1985) Proc. Natl. Acad. Sci. USA 82:488-92; Oliphant et al., (1986) Gene 44: 177-83) or DNA shuffling (Stemmer, (1994), Proc. Natl. Acad. Sci. USA 91: 10747-51).

[0210] As described in Example 1, for instance, an isolated nucleic acid comprising the nucleotide sequence encoding the C-terminal portion of TetR(D) can be subjected to DNA shuffling with a nucleic acid encoding the N-terminal portion of TetR(B) to create a pool of isolated nucleic acids encoding modified chimeric TetR(BD) repressors. The pool encoding the modified chimeric TetR(BD) repressors can be cloned and screened in a representative prokaryotic organism, Escherichia coli, for those clones comprising at least one mutation encoding an amino acid substitution and conferring a reverse phenotype. Analogous methods may be employed to create a pool of modified tetracycline repressors for screening using isolated nucleic acids encoding a member of or a chimera of any class of TetR repressor. The reverse phenotype may be identified or confirmed using a number of methods well known to those of skill in the art including, but not limited to, in vitro transcription assays and cell-based assays using reporter systems that are regulated by tetracycline.

[0211] A modified revTetR repressor of the present invention can be selected, for example, by incorporating an isolated nucleic acid of the present invention (e.g., see Section 5.2.3) into an expression vector and introduced into the desired prokaryotic organism for screening. A screening assay is used which allows for selection of a revTetR repressor which binds to a tet operator sequence in the prokaryotic organism only in the presence of tetracycline. For example, a pool of mutated nucleic acids in an expression vector can be introduced into the organism in which tet operator sequences control the expression of a reporter gene, e.g., a gene encoding a Lac repressor and the Lac repressor controls the expression of a gene encoding an selectable marker (e.g., drug resistance). Binding of a Tet repressor to tet operator sequences in the bacteria will inhibit expression of the Lac repressor, thereby inducing expression of the selectable marker gene. Cells expressing the marker gene are selected based upon the selectable phenotype (e.g., drug resistance). For wild-type Tet repressors, expression of the selectable marker gene will occur in the absence of tetracycline. A modified revTetR repressor is selected using this system based upon the ability to induce expression of the selectable marker gene in the bacteria only in the presence of tetracycline.

[0212] In another embodiment, methods for identifying modified tetracycline repressors that exhibit a reverse phenotype in prokaryotes are provided. In one aspect, the method comprises introducing into a prokaryotic organism a nucleic acid comprising a reporter gene operatively linked to a promoter regulated by tetracycline or tetracycline analog, transforming a culture of the prokaryotic organism with a collection of expression vectors, each comprising a nucleotide sequence encoding a modified tetracycline repressor containing at least one amino acid substitution, expressing the modified tetracycline repressor proteins in the organism in the presence or absence of tetracycline or tetracycline analog, and identifying those transformants that express or express at a higher level the reporter gene in the absence, but not the presence, of the tetracycline or tetracycline analog.

[0213] 5.5.2 Method of Making Modified Tetracycline Repressors

[0214] Described here are methods for preparing recombinant, modified tetracycline repressors that exhibit a reverse phenotype in prokaryotes. Methods of making the modified repressor in a gene regulation system are described in Section 5.6 hereinbelow.

[0215] The modified tetracycline repressors or peptides thereof that exhibit a reverse phenotype in prokaryotes of the present invention can be readily prepared, e.g., by synthetic techniques or by methods of recombinant DNA technology using techniques that are well known in the art. Thus, methods for preparing the target gene products of the invention are discussed herein. First, the polypeptides and peptides of the invention can be synthesized or prepared by techniques well known in the art. See, for example, Creighton, 1983, Proteins: Structures and Molecular Principles, W. H. Freeman and Co., N.Y., which is incorporated herein by reference in its entirety. Peptides can, for example, be synthesized on a solid support or in solution.

[0216] Alternatively, recombinant DNA methods which are well known to those skilled in the art can be used to construct expressible nucleic acids that encode a modified tetracycline repressor coding sequence such as those set forth in SEQ ID NOS. 1, 3, 5, 7, 9, 11, 13, 15, 17, 19, 21, 23, 25, 27, 29, and 265-458, to which are operably linked the appropriate transcriptional/translational control signals. These methods include, for example, in vitro recombinant DNA techniques, synthetic techniques and in vivo recombination/genetic recombination. See, for example, the techniques described in Sambrook et al., 1989, Molecular Cloning: A Laboratory Manual, Cold Spring Harbor Press, Cold Spring Harbor, N.Y., Pla et al., Yeast 12:1677-1702 (1996), and Ausubel, 1989, supra. Alternatively, RNA capable of encoding target gene protein sequences can be chemically synthesized using, for example, synthesizers. See, for example, the techniques described in Oligonucleotide Synthesis, 1984, Gait, M. J. ed., IRL Press, Oxford, which is incorporated herein by reference in its entirety.

[0217] Accordingly, the method for preparing these modified tetracycline repressors comprises introducing into an organism an expressible nucleic acid encoding a modified tetracycline repressor that exhibits a reverse phenotype in the prokaryotic organism, expressing the modified tetracycline repressor in the organism, and purifying the expressed modified tetracycline repressor. In one preferred embodiment, the expressible nucleic acid is an expression vector comprising the nucleotide sequence encoding the modified tetracycline repressor. In another preferred embodiment, the nucleotide sequence encoding the modified tetracycline repressor is selected from nucleotide sequence encoding any of the amino acid sequences of SEQ ID NOS. 2, 4, 6, 8, 10, 12, 14, 16, 18, 20, 22, 24, 26, 28, 30, and 71-264.

[0218] A variety of host-expression vector systems can be utilized to express the modified revTetR repressor coding sequences of the invention. Such host-expression systems represent vehicles by which the coding sequences of interest can be produced and subsequently purified, but also represent cells which can, when transformed or transfected with the appropriate nucleotide coding sequences, exhibit the target gene protein of the invention in situ. These include but are not limited to microorganisms such as bacteria (e.g., E. coli, B. subtilis) transformed with recombinant bacteriophage DNA, plasmid DNA or cosmid DNA expression vectors containing target gene protein coding sequences; yeast (e.g., Saccharomyces, Aspergillus, Candida, Pichia) transformed with recombinant yeast expression vectors containing the target gene protein coding sequences; insect cell systems infected with recombinant virus expression vectors (e.g., baculovirus) containing the target gene protein coding sequences; plant cell systems infected with recombinant virus expression vectors (e.g., cauliflower mosaic virus, CaMV; tobacco mosaic virus, TMV) or transformed with recombinant plasmid expression vectors (e.g., Ti plasmid) containing target gene protein coding sequences; or mammalian cell systems (e.g. COS, CHO, BHK, 293, 3T3) harboring recombinant expression constructs containing promoters derived from the genome of mammalian cells (e.g., metallothionein promoter) or from mammalian viruses (e.g., the adenovirus late promoter; the vaccinia virus 7.5K promoter). If necessary, the nucleotide sequences of coding regions may be modified according to the codon usage of the host such that the translated product has the correct amino acid sequence.

[0219] In bacterial systems, a number of expression vectors can be advantageously selected depending upon the use intended for the modified repressor being expressed. For example, when a large quantity of such a protein is to be produced, for the generation of antibodies or to screen for binding to DNA, for example, vectors which direct the expression of high levels of fusion protein products that are readily purified can be desirable. Such vectors include, but are not limited, to the E. coli expression vector pUR278 (Ruther et al., 1983, EMBO J. 2: 1791), in which the target gene protein coding sequence can be ligated individually into the vector in frame with the lacZ coding region so that a fusion protein is produced; pIN vectors (Inouye & Inouye, 1985, Nucleic Acids Res. 13: 3101-09; Van Heeke & Schuster, 1989, J. Biol. Chem. 264: 5503-09); and the like. pGEX vectors can also be used to express foreign polypeptides as fusion proteins with glutathione S-transferase (GST). In general, such fusion proteins are soluble and can easily be purified from lysed cells by adsorption to glutathione-agarose beads followed by elution in the presence of free glutathione. The pGEX vectors are designed to include thrombin or factor Xa protease cleavage sites so that the cloned target gene protein can be released from the GST moiety.

[0220] Following expression of a modified revTetR repressor, the resulting protein is substantially purified (e.g., see Ettner et al., (1996) J. Chromatogr. 742: 95-105). For example, the expressed proteins may be enriched from culture medium or a cell lysate by salt precipitation (e.g., ammonium sulfate) or gel filtration. The enriched fractions may be further purified using, for example, chromatographic methods, such as affinity chromatography using 1) tet operator sequences bound to solid supports or 2) antibodies directed against revTetR; ion-exchange chromatography or electrophoretic methods such as one- and two-dimensional gel electrophoresis, or isoelectric focusing gels. Such methods for the enrichment or purification of proteins are well known to those of skill in the art (e.g., Sambrook et al., (1989) Molecular Cloning: A Laboratory Manual, Cold Spring Harbor Press, Cold Spring Harbor, N.Y.). For example, revTetR genes are cloned into an expression plasmid such as, but not limited to, pWH1950 (Ettner et al., (1996) J. Chromatogr. 742: 95-105) under the control of a tac promoter, and the recombinant plasmid is used to transform a suitable E. coli host such as E. coli strain RB791. Cells are grown in 3-6 liters of LB medium at 22° C. in flasks on a rotary shaker to a density corresponding to an OD of 0.6 to 1.0. Expression of the recombinant revTetR gene is then initiated by addition of the gratuitous inducer isopropyl-β-D-galactopyranoside to a final concentration of 1 mM. Incubation is continued for 3 to 12 hours and the cells are then collected by centrifugation, resuspended in buffer A (0.05 M NaCl, 2 mM DTT, and 20 mM sodium phosphate, pH 6.8). The resuspended cells are broken by sonication and the revTetR protein purified by cation-exchange chromatography using POROS™ HS/M Medium (Applied Biosystems, Foster City, Calif.) and gel filtration as described, for example by Ettner et al. (Ettner et al., (1996) J. Chromatogr. 742: 95-105). Protein concentration is determined by UV-spectroscopy and saturating fluorescence titrations with anhydrotetracycline. In a specific embodiment, the yield of revTetR is increased by using a richer production medium such as TB-medium, (which is formulated as follows: 12 g tryptone, 24 g yeast extract, and 4 g glycerol are dissolved in distilled water and the volume adjusted to 900 ml. The solution is sterilized by autoclaving and then cooled to 60° C. or less and 100 ml of 0.17 M KH₂PO₄-0.72 M K₂HPO₄, pH 7.4 added), to which 0.4 μM tetracycline is added upon inoculation with the recombinant expression host strain.

[0221] 5.6 Genetic Regulatory Systems Based on Modified Tet Repressors

[0222] Described herein are prokaryotic organisms comprising a system of specific regulation of gene expression that is based on the modified tetracycline repressors of the invention. The regulated gene expression system of the invention comprises a prokaryotic host organism which carries expressible nucleic acid encoding a modified tetracycline repressor of the present invention, and a target gene of which the transcription is to be regulated specifically and which is operatively linked to a promoter and at least one tet operator sequence. In the absence of tetracycline or analogs thereof, wild-type levels of transcription of the target gene operatively linked to the tet operator sequence(s) occur. However, in the presence of tetracycline or analogs thereof, transcription of the target gene is repressed in accordance with the activity of the revTetR present in the prokaryotic organism.

[0223] Depending on the revTetR and the operator sequences, the level of repression can vary due to the DNA binding affinity of the revTetR, the affinity of the revTetR for tetracycline or the tetracycline analog used, and/or the ability of the revTetR to block transcription. The level of repression of transcription may vary depending upon the prokaryotic organism and, potentially, the site of integration of the target gene.

[0224] Typically, in order to repress transcription of the target gene, the prokaryotic organism is contacted with an effective and sub-lethal amount of tetracycline or a tetracycline analog. For example, to specifically repress target gene expression in a prokaryotic organism in culture, the organism is contacted with tetracycline or an analog thereof by culturing the organism in a medium containing an appropriate concentration of tetracycline or an analog thereof. A preferred concentration range for the inducing agent is between about 10 and about 1000 ng/ml, between about 5 and 1000 ng/ml, and between 1 and 1000 ng/ml. Tetracycline or analogs thereof can be directly added to medium in which the prokaryotic organisms are already being cultured. Alternatively, the cells are harvested from tetracycline-free medium and cultured in fresh medium containing tetracycline, or an analog thereof. Preferably, the prokaryotic organism is cultured in a medium containing a sub-inhibitory concentration of tetracycline or tetracycline analog.

[0225] The gene regulation system of the invention can also be used in an animal model wherein the test animal is infected with a prokaryotic organism comprising one or more genes whose expression is regulated by the tet regulatory system of the present invention. To specifically repress prokaryotic gene expression in the such an animal model, the prokaryotic organisms within the animal is contacted with tetracycline or an analog thereof by administering the tetracycline or an analog thereof to the animal. Depending on the animal, the dosage is adjusted to preferably achieve a serum concentration between about 0.05 and 1.0 μg/ml, between about 0.01 and 1.0 μg/ml, and between about 0.005 and 1.0 μg/ml tetracycline or analog thereof. The tetracycline or analog thereof can be administered by any means effective for achieving an in vivo concentration sufficient for the specific regulation of gene expression. Examples of suitable modes of administration include oral administration (e.g., dissolving tetracycline or analog thereof in the drinking water), slow release pellets or implantation of a diffusion pump. Preferably, the animal is a non-human animal, and can include but not limited to non-human primates, mammals such as mouse, rabbits, and rats, and other common laboratory animals.

[0226] The ability to use different tetracycline analogs allows for the modulation of the level of expression of a target gene sequence which is linked to a particular tet operator. For example, anhydrotetracycline has been demonstrated to efficiently repress transcription in prokaryotic organisms in the range of about 50-fold (e.g., see FIG. 2). Tetracycline, chlorotetracycline and oxytetracycline have been found generally to be weaker repressing agents.

[0227] Thus, an appropriate tetracycline analog can be chosen as a repressing agent based upon the desired level of gene expression. It is also possible to change the level of gene expression in a cell or animal over time by changing the tetracycline analog used as the repressing agent. For example, there may be situations where it is desirable to have a strong repression of target gene expression initially and then have a sustained lower level of target gene expression. Accordingly, an analog that represses transcription effectively can be used initially and then the repressing agent can be switched to tetracycline or an analog that results in a low level of transcription. It is also desirable that, upon removal of tetracycline or tetracycline analog, wild-type levels of transcription can be restored from the regulated target gene, thereby allowing the targeted gene product to be expressed.

[0228] Moreover, the gene regulation system of the invention can accommodate regulated expression of more than one target gene. A first target sequence can be regulated by one class of tet operator sequence(s) and a second target sequence is regulated by another class of tet operator sequence. Moreover, chimeric revTet repressors comprising a tetracycline-binding domain from a revTetR protein and a DNA binding domain from a DNA-binding protein other than a TetR protein may be used to regulate one or more genes operably associated with a DNA sequence bound by the non-TetR DNA binding domain of the chimeric protein. Such chimeric proteins would, without limitation, include DNA binding domains that would recognize and bind other operator sequence (e.g, O_{L}, hixL, hixR), with an affinity that can be different than that of a TetR protein for a tet operator sequence. The level of expression of each of the target sequences can be regulated differently and/or independently depending upon which revTetR repressor is used to regulate transcription and which tetracycline analog(s) is used as the repressing agent. Additionally, the expression of each gene may be modulated by varying the concentration of tetracycline or tetracycline analog in the culture medium or within the animal. Thus, the expression system of the invention provides a method not only for turning gene expression on or off, but also for “fine tuning” the level of gene expression at intermediate levels depending upon the type of revTetR, operator sequence, and concentration of agent used.

[0229] Different levels of expression of two genes regulated by the same revTet repressor of the present invention can be achieved by operably associating each target gene with a different tet operator sequence. There is sufficient cross-recognition of the different tet operators by individual revTetR proteins (Klock et al. 1985 J. Bacteriol. 161(1): 326-32) to permit a given revTetR protein to regulate the expression of both genes, but to a different extent, at a given concentration of tetracycline or tetracycline analog.

[0230] In further embodiments of the present invention, variant revTetR proteins are constructed and those capable of binding to one or more tet operators are identified. In certain embodiments, binding is evaluated against variant tet operators that are not recognized or bound by wild-type TetR proteins. Such variant revTetR proteins are generated by mutagenesis directed toward DNA sequences encoding amino acid residues known to be involved in tet operator sequence recognition. Methods for the generation and evaluation of such variant TetR and, therefore, revTetR proteins and evaluating the affinity with which they bind to naturally-occurring and variant tet operator sequences are well known in the art. See, for example, Baumeister et al. (J. Mol. Biol. 226(4): 1257-70 (1992)), Helbl et al. (J. Mol. Biol. 245(5): 538-48; J. Mol. Biol. 276(2): 313-18 (1998), and J. Mol. Biol. 276(2): 319-24 (1998)), each of which is hereby incorporated by reference in its entirety. Use of such variant revTetR proteins in conjunction with variant tet operator sequences enables separate, tetracyline-dependent regulation of more than one gene within the same prokaryotic cell. By independently varying the level of expression of each of a plurality of revTetR proteins expressed in a prokaryotic cells, wherein each revTetR protein (or variant thereof) recognizes a different tet operator sequence (or variant thereof), the level of expression of each target gene operatively associated with a different tet operator is also independently regulated by the level of tetracycline to which that prokaryotic cell is exposed. Independent regulation of the level of expression of the plurality of revTetR-encoding genes is accomplished, for example, by operatively associating each revTetR-encoding gene with a different promoter which may include additional genetic regulatory elements, such as but not limited to, a repressor or activator binding sequence. In addition, the revTetR-encoding genes may be incorporated within distinct replicons that have different copy numbers within the prokaryotic host cell. Heterodimers between and among different revTetR and/or TetR proteins do not form where the tet-operator binding domains are different for each revTetR and/or TetR protein. Accordingly, each gene that is regulated by a different tet operator can be differentially regulated using different revTetR and/or TetR proteins, where each recognizes and binds a different tet operator.

[0231] In a further embodiment, a target gene within a prokaryotic host cell is operatively associated with a tet operator sequence recognized and bound by a wild-type TetR protein as well as a revTetR protein. The prokaryotic host cell further comprises at least one copy of a gene encoding the wild-type TetR protein as well at least one copy of a gene encoding the revTetR protein. In this embodiment, the TetR and revTetR encoding genes are operatively associated with different genetic regulatory elements providing independent expression of each type of repressor protein. In this manner, the target gene is either positively or negatively regulated by the presence of tetracycline, depending on whether the wild-type TetR or the revTetR protein is being expressed, respectively.

[0232] In another aspect of the present invention, a prokaryotic structural gene encoding either a positive regulator or a negative regulator of gene expression is engineered to be operably associated with a promoter and at least one tet operator sequence. In this embodiment, the level of expression of the positive or negative regulatory protein (and, consequently each of the genes subject to their regulation) is dependent upon the level of revTet repressor protein in the cell and the concentration of tetracycline or tetracycline analog to which the prokaryotic host is exposed. In this embodiment, addition of tetracycline will result in the binding of a revTetR-tetracycline complex to a tet operator or tet operators and, in one example, thereby repress expression of a negative regulator, leading to increased expression of those genes regulated by the negative regulator. Similarly addition of tetracycline will result in revTetR-mediated repression of the expression of a positive regulator operably associated with a tet operator, thereby leading to decreased expression of those genes regulated by the positive regulator. Where desired, the tet regulatory system of the present invention could therefor be used to regulate expression of both a positive and negative regulatory proteins in the same prokaryotic host, thereby providing a method for simultaneously increasing the expression of one set of co-regulated genes while decreasing the level of expression of a second set of co-regulated genes, by contacting the host expressing a revTetR of the present invention with tetracycline or a tetracycline analog.

[0233] 5.6.1 Prokaryotic Organisms of the Invention

[0234] In various embodiments, prokaryotic organisms comprising an expressible nucleic acid encoding a modified tetracycline repressor of the present invention are provided. Presently preferred prokaryotic organisms for use herein include, but are not limited to Bacillus anthracis, Bacteriodes fragilis, Bordetella pertussis, Burkholderia cepacia, Camplyobacter jejuni, Chlamydia pneumoniae, Chlamydia trachomatus, Clostridium botulinum, Clostridum tetani, Clostridium perfringens, Clostridium difficile, Corynebacterium diptheriae, Enterobacter cloacae, Enterococcus faecalis, Escherichia coli, Haemophilus influenzae, Helicobacter pylori, Klebsiella pneumoniae, Listeria monocytogenes, Moraxella catarrhalis, Mycobacterium leprae, Mycobacterium tuberculosis, Neisseria gonorrhoeae, Nesseria meningitidis, Nocardia asteroides, Proteus vulgaris, Pseudomonas aeruginosa, Salmonella typhi, Salmonella typhimurium, Shigella boydii, Shigella dysenteriae, Shigella flexneri, Shigella sonnei, Staphylococcus aureus, Staphylococcus epidermidis, Streptococcus mutans, Streptococcus pneumoniae, Treptonema pallidum, Vibrio cholerae, Vibrio parahemolyticus, and Yersina pestis. Also included are other related genera and species that cause a disease with substantially similar pathology as that caused by the above prokaryotic organisms.

[0235] Any method known to those of skill in the art, including those described herein, may be used to introduce the nucleic acids of the present invention into prokaryotic organisms. Suitable methods for introducing isolated nucleic acids into host cells are known to those of skill in the art and include, but are not limited to, natural competency, calcium chloride transformation, protoplast transformation, electroporation, conjugation, and generalized and specialized transduction (e.g., see Sambrook et al. (1989) Molecular Cloning: A Laboratory Manual, 2nd Edition, Cold Spring Harbor Laboratory press; Gotz et al., (1987) FEMS Microbiol. Lett. 40:285-288; Biswas et al., (1993) J. Bacteriol. 175:3628-3635; Luchansky et al., (1988) Mol. Microbiol. 2, 637-646; Dunny et al., (1991) Appl. Environ. Microbiol. 57, 1194-1201; Cruz-Rodz and Gilmore (1990) Mol. Gen. Genet. 224: 152-154; Park and Stewart (1990) Gene 94: 129-132; Jacob and Hobbs (1974) J. Bacteriol. 117: 360-3721; Novick et al., (1986) J. Mol. Biol. 192: 209-20, and other laboratory textbooks, such as Clark & Russell, Molecular Biology, made simple and fun, Cache River Press, Vienna, Ill.). 5.6.2. Expression Vectors for Expression of Tet Repressors of the Invention

[0236] In various embodiments, the present invention provides expressible nucleic acids for the synthesis of the revTet repressors of the present invention which comprise nucleotide sequences encoding a modified tetracycline repressor of the present invention operably linked to another nucleotide sequence that comprises a promoter that is active in the prokaryotic organism(s) of choice. The expressible nucleic acid can be an expression vector, which may propagate extra-chromosomally. Many such expression vectors are known in the art. The promoter may be constitutive or inducible. A wide variety of promoters that are active in gram positive and/or gram negative bacteria are known to those of skill in the art and can be used herein, including but not limited to, the Bacillus aprE and nprE promoters (U.S. Pat. No. 5,387,521), the bacteriophage lambda P_{L} and P_{R} promoters (Renaut, et al., (1981) Gene 15: 81), the trp promoter (Russell, et al., (1982) Gene 20: 23), the tac promoter (de Boer et al., (1983) Proc. Natl. Acad. Sci. USA 80: 21), B. subtilis alkaline protease promoter (Stahl et al. (1984) J. Bacteriol. 158: 411-18) alpha amylase promoter of B. subtilis (Yang et al., (1983) Nucleic Acids Res. 11: 237-49) or B. amyloliquefaciens (Tarkinen, et al., (1983) J. Biol. Chem. 258: 1007-13), the neutral protease promoter from B. subtilis (Yang et al., (1984) J. Bacteriol. 160: 15-21), T7 RNA polymerase promoter (Studier and Moffatt (1986) J Mol Biol. 189(1): 113-30), B. subtilis xyl promoter or mutant tetR promoter active in bacilli (Geissendorfer & Hillen (1990) Appl. Microbiol. Biotechnol. 33: 657-663), Staphylococcal enterotoxin D promoter (Zhang and Stewart (2000) J. Bacteriol. 182(8): 2321-25), cap8 operon promoter from Staphylococcus aureus (Ouyang et al., (1999) J. Bacteriol. 181(8): 2492-500), the lactococcal nisA promoter (Eichenbaum (1998) Appl Environ Microbiol. 64(8): 2763-9), promoters from in Acholeplasma laidlawii (Jarhede et al., (1995) Microbiology 141 (Pt 9): 2071-9), porA promoter of Neisseria meningitidis (Sawaya et al., (1999) Gene 233: 49-57), the fbpA promoter of Neisseria gonorrhoeae (Forng et al., (1997) J. Bacteriol. 179:3047-52), Corynebacterium diphtheriae toxin gene promoter (Schmitt and Holmes (1994) J. Bacteriol. 176(4): 1141-49), the hasA operon promoter from Group A Streptococci (Alberti et al., (1998) Mol Microbiol 28(2): 343-53) and the rpoS promoter of Pseudomonas putida (Kojic and Venturi (2001) J. Bacteriol. 183: 3712-20). All of the above-identified references are incorporated herein by references in their entireties.

[0237] By adjusting the strength of the promoter operatively linked to the isolated nucleic acid comprising a nucleotide sequence encoding a revTetR, adjusting the nucleotide sequence of the encoded revTetR repressor to optimize or diminish the use of preferred codons in the prokaryotic host of choice or to stabilize or destabilize the encoding mRNA, and/or adjusting the copy number of the vector backbone, the relative levels of transcription and/or translation of a gene operatively linked to a tet operator sequence(s) may be titrated over a wide range.

[0238] 5.6.3. Operator Sequences used in Tet-Regulated Expression Systems of the Invention

[0239] The genetic regulatory system disclosed herein comprises one or more tet operator sequences, generally two or more, operably associated with the target gene to be controlled by a revTetR of the present invention in the presence of tetracycline or a tetracycline analog. Nucleotide sequences comprising a tet operator sequence recognized and bound by TetR(A), TetR(B), TetR(C), TetR(D), and TetR(E), are provided herein as SEQ ID NO: 51 to 55, respectively. Each of these sequences has been found within the nucleic acid sequence situated between the TetA gene and the TetR gene of each class. Accordingly, although the tet operator sequences specifically recognized by TetR(G), TetR(H), TetR(J), TetR(K), and TetR(Z), have not been precisely defined by genetic analysis, it is apparent that the nucleotide acid sequence situated between the TetA gene and the TetR gene of each of these classes where TetR expression is auto-regulated and TetA expression is tetracycline-inducible, comprises a tet operator sequence as well. One or more of each of these tet operator sequences is operably associated with the target gene using methods well known in the art to provide a chimeric gene that is expressed at reduced level in the presence of a revTetR of the present invention and tetracycline or an analogue thereof.

[0240] In another embodiment of the present invention, the revTetR protein is a chimeric protein comprising a tetracycline-binding domain of a TetR protein operably fused to a DNA binding domain derived from a DNA-binding protein other than a TetR protein. In this aspect of the invention, the nucleic acid sequence operably associated with the target gene comprises the nucleotide sequence recognized and bound by the non-TetR-DNA-binding domain of, for example, Hin recombinase. In this example the operator sequence comprises, e.g. the HixL sequence; that is, the operator sequence that operably associated with the target gene comprises SEQ ID NO: 60. The non-TetR-DNA-binding domain may be derived from the DNA-binding domain of Hin recombinase or from the Hin-related proteins, Cin, Gin, and Pin, (SEQ ID NO: 56 to 59, respectively) and the operator sequence operably associated with the target gene will comprise the nucleotide sequences recognized by these recombinases (60-67), or to any one of the group comprising (SEQ ID NO: 60-67) (Feng et al. 1994 Science 263: 348-55).

[0241] In certain embodiments of the tet-regulated expression of the present invention, the class of revTetR and corresponding operator sequence are matched with the organism or genus in which they were discovered. For example, a tet-regulated expression system to be established in a prokaryotic organism harboring the pAG1, a gram-positive organism, a member of the genus Corynebacteria including but not limited to Corynebacterium glutamicum, would comprise a revTetR(Z) and tet(Z) operator sequence.

[0242] 5.7 Uses of the Gene Regulation System

[0243] 5.7.1 Identification and Validation of Essential Genes

[0244] Methods for identifying and validating genes or gene products essential for proliferation or pathogenicity of a prokaryotic organism are provided. In one embodiment, the present invention is directed toward a method for identifying a gene or gene product essential for proliferation or pathogenicity of a prokaryotic organism comprising placing a nucleic acid comprising a nucleotide sequence encoding a putative essential gene under control of at least one tet operator, introducing an expression vector comprising a nucleotide sequence encoding a modified tetracycline repressor into the a prokaryotic organism, expressing the modified tetracycline repressor polypeptide, contacting the organism with a concentration of tetracycline or tetracycline analog sufficient to repress the expression level of gene product, and determining the viability of the organism. In preferred aspects of this embodiment, the concentration of tetracycline or tetracycline analog sufficient to repress the expression level of gene product is a sub-inhibitory concentration.

[0245] In one embodiment of the cell-based assays, conditional-expression prokaryotic strains expressing a revTetR repressor described herein, in which the nucleotide sequences required for survival, growth, proliferation, virulence, or pathogenicity of a prokaryotic organism are under the control of a tet regulatable promoter, are grown in the presence of a concentration of tetracycline or analog, or repressor thereof which causes the function of the gene products encoded by these sequences to be rate limiting for growth, survival, proliferation, virulence, or pathogenicity. To achieve that goal, a growth inhibition dose curve of tetracycline or tet analog or repressor is calculated by plotting various doses of tetracycline or repressor against the corresponding growth inhibition caused by the limited levels of the gene product required for fungal proliferation. From this dose-response curve, conditions providing various growth rates, from 1 to 100% as compared to tetracycline or tet analog or repressor-free growth, can be determined. For example, if the regulatable promoter is repressed by tetracycline, the conditional-expression strain may be grown in the presence of varying levels of tetracycline. For example, the highest concentration of the tetracycline or tet analog or repressor that does not reduce the growth rate significantly can be estimated from the dose-response curve. Cellular proliferation can be monitored by growth medium turbidity via OD measurements. In another example, the concentration of tetracycline or tet analog or repressor that reduces growth by 25% can be predicted from the dose-response curve. In still another example, a concentration of tetracycline or tet analog or repressor that reduces growth by 50% can be calculated from the dose-response curve. Additional parameters such as colony forming units (cfu) are also used to measure cellular growth, survival and/or viability.

[0246] Conditional-expression cells as described above, which comprise a revTetR according to the present invention, that are to be assayed, are exposed to the above-determined concentrations of tetracycline or tet analog. The presence of the tetracycline or tet analog and the revTetR at this sub-lethal, preferably sub-inhibitory, concentration reduces the amount of the proliferation-required gene product to the lowest level that will support growth of the cells. Cells grown in the presence of this concentration of tetracycline or tet analog or repressor are therefore specifically more sensitive to inhibitors of the proliferation-required protein or RNA of interest as well as to inhibitors of proteins or RNAs in the same biological pathway as the proliferation-required protein or RNA of interest but not specifically more sensitive to inhibitors of unrelated proteins or RNAs.

[0247] Prokaryotic cells pretreated with sub-inhibitory concentrations of tetracycline or tet analog or repressor, which therefore contain a reduced amount of proliferation-required target gene product, are used to screen for compounds that reduce cell growth. The sub-lethal concentration of tetracycline may be any concentration consistent with the intended use of the assay to identify candidate compounds to which the cells are more sensitive than are control cells in which this gene product is not rate-limiting. For example, the sub-lethal concentration of the tetracycline or tet analog may be such that growth inhibition is at least about 5%, at least about 8%, at least about 10%, at least about 20%, at least about 30%, at least about 40%, at least about 50%, at least about 60% at least about 75%, at least 80%, at least 90%, at least 95% or more than 95%. Cells which are pre-sensitized using the preceding method are more sensitive to inhibitors of the target protein because these cells contain less target protein to inhibit than wild-type cells.

[0248] Alternatively, the regulatory system may be utilized to differentiate between a static or cidal phenotype of a putative essential gene product. For example, a prokaryotic organism of the present invention may be incubated in the presence of an inhibitory concentration of tetracycline or analog thereof sufficient to fully repress transcription of the putative essential gene product under the control of at least one tet operator sequence. The tetracycline or analog is then removed by washing whereupon after a predetermined period of time transcription from the tet-regulated promoter is initiated (e.g., see FIG. 3). In those organisms wherein the deprivation of an essential gene product exhibits a “static” phenotype, the organisms will begin to grow as sufficient levels of gene product accumulate to sustain proliferation. In those organisms wherein the deprivation of an essential gene product exhibits a “cidal” phenotype, the organisms will not grow even if sufficient levels of gene product accumulate to sustain proliferation.

[0249] It will be appreciated that similar methods may be used to identify compounds which inhibit virulence or pathogenicity. In such methods, the virulence or pathogenicity of cells exposed to the candidate compound which express rate limiting levels of a gene product involved in virulence or pathogenicity is compared to the virulence or pathogenicity of cells exposed to the candidate compound in which the levels of the gene product are not rate limiting. Virulence or pathogenicity may be measured using the techniques described herein.

[0250] Similarly, the above method may be used to determine the pathway on which a test compound, such as a test antibiotic acts. A panel of cells, each of which expresses a rate limiting amount of a gene product required for fungal survival, growth, proliferation, virulence or pathogenicity where the gene product lies in a known pathway, is contacted with a compound for which it is desired to determine the pathway on which it acts. The sensitivity of the panel of cells to the test compound is determined in cells in which expression of the nucleic acid encoding the gene product required for proliferation, virulence or pathogenicity is at a rate limiting level and in control cells in which expression of the gene product required for proliferation, virulence or pathogenicity is not at a rate limiting level. If the test compound acts on the pathway in which a particular gene product required for proliferation, virulence, or pathogenicity lies, cells in which expression of that particular gene product is at a rate limiting level will be more sensitive to the compound than the cells in which gene products in other pathways are at a rate limiting level. In addition, control cells in which expression of the particular gene required for fungal proliferation, virulence or pathogenicity is not rate limiting will not exhibit heightened sensitivity to the compound. In this way, the pathway on which the test compound acts may be determined.

[0251] In certain aspects of each of these embodiments, regulation of the target gene of a prokaryotic organism (e.g. an essential gene or virulence gene) operatively associated with a tet operator, is modulated, in part, by the level of revTetR protein in the cell. Expression levels of revTetR protein withing a prokaryotic host cell are varied and modulated by the choice of the promoter operatively associated with the structural gene encoding the revTetR protein. Further control over the level of RevTetR expression is obtained by incorporating, or example, one or more regulatory sequences recognized and bound by a repressor protein and/or by an activator protein, and/or one or more sequences recognized and bound by at least one regulatory protein responding to the presence or absence of particular metabolites or substrates, such as but not limited to, glucose and phosphate. An additional level of control over the intracellular level of a RevTetR protein is provided by the copy number of the replicon carrying the revTetR-encoding gene, which can be integrated into the genome of the prokaryotic host or it may be included within a plasmid having high (˜50 to ˜100 or more copies/cell), intermediate (˜10 to ˜50 copies/cell), or low (˜1 to ˜10 copies/cell) copy number.

[0252] 5.7.2 Target Evaluation in an Animal Model System

[0253] Validation of an essential drug target in prokaryotic organisms is often demonstrated by examining the effect of gene inactivation under standard laboratory conditions. Putative drug target genes deemed nonessential under standard laboratory conditions may be examined within an animal model, for example, by testing the pathogenicity of a strain having a deletion in the target gene versus wild type. However, essential drug targets are precluded from animal model studies. Therefore, the most desirable drug targets are omitted from the most pertinent conditions to their target evaluation.

[0254] In an embodiment of the invention, conditional expression, provided by the revTetR regulatory system, overcomes this longstanding limitation to target validation within a host environment. Animal studies can be performed using mice inoculated with conditional-expression prokaryotic strains and examining the effect of gene inactivation by conditional expression. Exemplary mouse models for monitoring the bacterial infections include, but are not limited to, the CD-1 mouse model (Yanke et al., (2000) Can J Microbiol. 10: 920-26), peritonitis/sepsis model (e.g., Frimodt-Moller et al., in Handbook of Animal Models of Infection (Zak and Sande eds), Chapter 14, pp. 125-136, Academic Press, San Diego, Calif.) or the murine thigh infection model (e.g., Gudmundsson and Erlendsdottir, in Handbook of Animal Models of Infection (Zak and Sande eds), Chapter 15, pp. 137-144, Academic Press, San Diego, Calif.).

[0255] In a preferred embodiment of the invention, the effect on mice injected with a lethal inoculum of a conditional-expression pathogenic prokaryotic organism could be determined depending on whether the mice were provided with an appropriate concentration of tetracycline to inactivate expression of a drug target gene. The lack of expression of a gene demonstrated to be essential under laboratory conditions can thus be correlated with prevention of a terminal infection. In this type of experiment, only mice “treated” with tetracycline-supplemented water, are predicted to survive infection because inactivation of the target gene has killed the conditional-expression prokaryotic pathogen within the host.

[0256] 5.7.3. Use of revTetR Regulated Genes for Large-Scale Production of Proteins

[0257] In certain embodiments, the present invention is directed toward the large-scale protein production using revTetR-regulated gene expression of a target gene product in a prokaryotic host organism. In one aspect of this embodiment, a target gene encoding the protein of interest is operatively associated with a suitable promoter and at least one tetracycline operator sequence such that tet-operator-bound repressor inhibits transcription of the target gene. In one aspect of this embodiment, either or both of the gene encoding a revTetR repressor protein and the gene encoding the target protein are integrated into the genome of the prokaryotic host organism or carried on an episomal replicon in the prokaryotic host cell. Expression of the revTetR protein is regulated or constitutive as desired or required by the adverse or toxic effect of the target gene product on the prokaryotic organism. The level of expression of the revTetR protein is also regulated by the copy number of the replicon carrying the revTetR protein-encoding gene. In certain embodiments, the prokaryotic host cell is grown in the presence of a repressing amount of tetracycline, and at a desirable time, expression of the target gene is induced by removal or reduction of the level of tetracyline or tetracycline analogue by centrifugation, washing, and resuspension of the host cells, by dilution of the host cells into a tetracycline-free medium, or removal of tetracycline or tetracyline analogue by resin binding.

[0258] In another aspect of this embodiment, the method uses a revTetR protein that expresses the revTet phenotype only at a low temperature, e.g. 28° C. but not at 37° C. The host cell is cultured at 28° C. in the presence of tetracycline or a tetracycline analog and when desired, expression of the target gene is induced by shifting the host cell culture to 37° C. In yet another aspect of this embodiment, the method uses a revTetR protein that expresses the revTet phenotype only at a high temperature, e.g. 37° C. but not at 28° C. In this embodiment, the prokaryotic host cell is cultured at 37° C. in the presence of tetracycline or a tetracycline analog, and expression of the target gene is induced by shifting the host cell culture to 28° C.

[0259] 5.7.4 Use of revTetR Regulated Genes in Proteomics

[0260] In a further embodiment, the present invention is directed toward the use of revTetR regulated systems for regulation of gene expression in a prokaryotic organism for the analysis of total protein expression in that host. In various aspects of this embodiment, the level of expression of one or more tet-regulated genes is modulated by virtue of the concentration of tetracyline, the level of expression of the revTetR protein, and/or as disclosed in Section 5.7.3, the temperature. In one aspect of this embodiment, one or more genes, which may be essential genes or genes required for pathogenicity or virulence of a prokaryotic organism are operatively associated with at least one tetracycline operator within a host cell expression a revTetR protein of the present invention. The construction of such host cells is carried out according to the methods of Section 5.7.1. Examination of such cells by procedures and methods of proteomics research well known in the art is applied to identify coordinately expressed/regulated proteins and, ideally, the regulatory proteins involved. In one aspect of this embodiment, identified repressors and positive regulators are placed under tet-regulated expression and the nature of the coordinately-regulated expression system is examined, with respect to whether it is essential for survival of the prokaryotic organism and/or required for pathogenicity.

[0261] 5.7.5 Use of revTetR Regulated Genes for the Expression of Antisense RNA Synthesis

[0262] In a further embodiment, expression of one or more target genes in a prokarytoic organism is modulated via tet-regulated expression of an antisense RNA molecule that inhibits translation of mRNA transcribed from the target gene(s). In this embodiment, a coding region encoding a target-gene-specific antisense RNA is operatively associated with a promoter and a tetracycline operator sequence in such a manner that binding of a tetracycline repressor to that operator prevents synthesis of the antisense RNA molecule in the prokaryotic host cell. In various aspects of this embodiment, the level of expression of an antisense RNA molecule, and translation of a target gene mRNA inhibited by the antisense RNA molecule, is modulated by the concentration of tetracyline or its analog, the level of expression of the revTetR protein, and/or the temperature as disclosed in Section 5.7.3.

[0263] For example, in the presence of tetracyline, the expression of a target gene is uninhibited in a prokaryotic host cell carrying a tet-regulated antisense RNA coding sequence which is specific for the target gene, and at least one revTetR-encoding gene, since the expression of antisense RNA is inhibited. However, in the absence of tetracycline, the expression of a target gene is inhibited in a prokaryotic host cell carrying a tet-regulated antisense RNA coding sequence which is specific for the target gene, and at least one revTetR-encoding gene, since the expression of the antisense RNA is permitted. In a particular aspect of this embodiment, the target gene corresponds to one copy of a duplicated gene in a prokaryotic organism, thereby allowing the construction of a prokaryotic host cell that can be functionally haploid for that gene product. Such organisms are particularly useful for the detection of anti-microbial agents active against the encoded target gene product.

[0264] 5.8 Kits

[0265] The present invention is further directed toward kits comprising components of the tetracycline-regulated expression systems disclosed herein, and instructions for use thereof Such kits include a recombinant expression vector that encodes at least one revTetR protein operably associated with a promoter active in the prokaryotic host into which the present tet-regulatory system is to be introduced. In another embodiment, the expression vector comprises a structural gene encoding a revTetR protein of the present invention, and an upstream restriction site, generally as part of a polylinker sequence, into which the end user can insert any promoter of interest to that user.

[0266] In another embodiment, the kit further comprises a second recombinant expression vector, comprising at least one TetO sequence bracketed by at least two restriction sites positioned on opposite sides of the operator sequence. The end user can insert a promoter into one of these sites and a structural gene encoding a protein (or an antisense RNA molecule) to be placed under tetracycline regulation into the second site. In other embodiments, the second expression vector may comprise a promoter already operably associated with the operator sequence. In still another embodiment, the operator sequence is not a TetO sequence but, rather, corresponds to a binding site for a non-TetR DNA-binding protein which is bound by the DNA binding domain of a chimeric revTetR protein as disclosed herein.

[0267] In a further embodiment, the kit may also comprise at least one tetracycline or tetracycline analogue, such as, but not limited to anhydrotetracycline and doxycycline.

[0268] 5.9 Identification of Non-Antibiotic Inducers of Modified Repressors

[0269] In yet another embodiment of the present invention, the modified revTetR repressors may be used in methods for identifying non-antibiotic compounds that specifically interact with revTetR, but not wild type repressors, in prokaryotes. In one embodiment, a method for identifying non-antibiotic compounds that specifically interact with revTetR in a prokaryotic organism is provided, said method comprising introducing into a prokaryotic organism a first nucleic acid comprising a reporter gene operatively linked to a promoter regulated by tetracycline or tetracycline analog, introducing an expression vector comprising a nucleotide sequence encoding a modified tetracycline repressor into the prokaryotic organism, expressing the modified tetracycline repressor, contacting the prokaryotic organism with a plurality of candidate compounds, and identifying those compounds that repress expression of the reporter gene product.

[0270] The candidate compounds can be obtained from a number of commercially available sources and include, for example, combinatorial libraries, natural product libraries, peptides, antibodies (including, but not limited to polyclonal, monoclonal, human, humanized, anti-idiotypic, chimeric or single chain antibodies, and FAb, F(ab′)₂ and FAb expression library fragments, and epitope-binding fragments thereof), and small organic or inorganic molecules.

### 6. EXAMPLES

[0271] 6.1 Construction and Identification of Modified Tetracycline Repressors Exhibiting a Reverse Phenotype in Gram Negative Bacteria

[0272] A pool of mutated Tet repressor proteins was generated by a series of steps based on a method described in Stemmer, 1994, Proc. Natl. Acad. Sci. USA 91: 10747-51. Briefly, a double-stranded DNA substrate comprising a nucleotide sequence encoding amino acids 51-208 of TetR(D) (e.g., nucleotides 151 to 624 of SEQ ID NO. 31) was amplified by error-prone PCR (i.e. PCR performed in the presence of 0.5 mM MnCl₂ and unequal concentrations of the four dNTP substrates to introduce random mutations) using Taq DNA polymerase purchased from Pharmacia. Approximately 2-4 μg DNA substrate was digested using about 0.0015 units of DNase I per μl in 100 μl of a solution of 50 mM Tris-HCl, pH 7.4 and 1 mM MgCl₂ for about 10 minutes at room temperature. The DNAse concentration and the duration of the DNAse digestion are determined empirically and adjusted to generate products in the range of about 10 to about 70 bp, as measured by PAGE in an 8% polyacrylamide gel. DNA fragments of about 10 to 70 bp were purified from an 8% polyacrylamide gel as described in Sambrook et al. (Sambrook et al., 2001, Molecular Cloning, A Laboratory Manual, Cold Spring Harbor Press, Cold Spring Harbor, N.Y.). Briefly, a polyacrylamide block containing DNA fragments of the desired size is incubated overnight at 37° C. in PAA-elution buffer, (0.3 M sodium acetate, pH 5.2, 0.01 M MgCl2, and 0.1% SDS). DNA in the eluate is precipitated in ethanol:acetone (1:1).

[0273] The nucleic acid molecules comprising the nucleotide sequence of the C-terminal portion of TetR(D) (amino acids 51 to 208), which included random mutations, were assembled from the gel-purified fragments using PCR amplification in the absence of exogenous oligonucleotide primers. For this purpose, the purified, randomized C-terminal TetR(D) fragments were resuspended in PCR mixture (0.2 mM each dNTP, 2.2 mM MgCl₂, 50 mM KCl, 10 mM Tris-HCl, pH 9.0, 0.1% Triton X-100) at a concentration of 10-30 ng/μl and Taq DNA polymerase was added to the reaction mixture (2.5 Units/100 μl). This PCR amplification was followed by a third PCR amplification in the presence of the oligonucleotide primers that had already been used in the error-prone PCR to amplify the reassembled TetR gene. The PCR reactions were carried out in a GeneAmp PCR System 2400 instrument (Perkin-Elmer, Norwalk, Conn.), employing three separate programs. In the first, error-prone PCR amplification was carried out as follows: 30 cycles of 1 min. at 94° C., 1 min. at 55° C., 1 min. at 72° C. The second program, designed to reassemble the tetR gene and incorporate the mutations created in the first program, was performed as follows: 25 cycles of 30 sec. at 94° C., 30 sec. at 30° C., 30 sec. at 72° C. The third program involved PCR amplification in the presence of primers: 25 cycles of 30 sec. at 94° C., 30 sec. at 50° C., 30 sec. at 72° C. The amplified DNA was digested with restriction enzymes that cleave in the termini of the amplified fragments.

[0274] The pool of mutated Tet repressors was cloned into plasmid pWH1411 (Baumeister et al., 1992, Proteins: Struct. Funct. Genet. 14: 168-77), which carries a TetR(B) gene, to provide a TetR(BD) chimera that included, as the amino-terminal portion, amino acid residues 1 to 50 of the TetR(B) gene and, as the carboxyl-terminal portion, amino acid residues 51 to 208 of the TetR(D) gene. The resulting plasmid pool was screened in a genetic assay which positively selects for a functional interaction between a Tet repressor and its cognate operator using E. coli strain WH207(λWH25) (the construction of this strain is described in detail in Wissmann et al., (1991) Genetics 128: 225-32). In this E. coli strain, tet operators direct the expression of divergently arranged β-galactosidase (lacZ) and Lac repressor (lacI) genes and the lac regulatory region directs the expression of a galactokinase (galK) gene on plasmid pWH414. Binding of Tet repressors to tet operators turns off transcription of the lacI and lacZ genes. The absence of Lac repressor allows for expression of the galK gene, which enables the E. coli strain to use galactose as a sole carbon source, which serves as one marker. The lacZ⁻ phenotype serves as a second marker. Thus, bacteria containing Tet repressors which bind to tet operators, have a Gal⁺, lacZ⁻ phenotype. Bacteria containing wild-type Tet repressors have a Gal⁺, lacZ⁻ phenotype in the absence of tetracycline. Modified “reverse” Tet repressors (revTetR) were selected based upon a Gal⁺, lacZ⁻ phenotype in the presence of tetracycline.

[0275] A total of 15 clones exhibiting a reverse phenotype in E. coli were identified using the above-described screening procedure. The nucleotide and amino acid sequence of the identified revTetR repressors were determined (ABI DNA Sequencer, Perkin Elmer, Norwalk, Conn.) and are shown in SEQ ID NOS: 1, 3, 5, 7, 9, 11, 13, 15, 17, 19, 21, 23, 25, 27 and 29 (nucleotide positions 1-624) and 2, 4, 6, 8, 10, 12, 14, 16, 18, 20, 22, 24, 26, 28 and 30 (amino acid positions 1-208), respectively. The clone designation, identified amino acid substitutions, and relative activity of non-repressed to repressed levels of transcription at two different temperatures are shown in Table 5.

TABLE 5
Relative Activity of revTetR repressors

| Substitution(s) | Clone | 28° C. ratio | 37° C. ratio |
|---|---|---|---|
| GR96, TS103, EV114 | 14 | 24.5 | 1.3 |
| GE96, DN157, QH200 | 17b | 38.5 | 1.4 |
| GR96, PL159 | 5a | 9.5 | 18.4 |
| AV160, DV178, GW196 | 10 | 2.6 | 6.5 |
| IN59, DE95, HA100 | 17a | 9.3 | 23.4 |
| AV71, DG95, LR127 | 19 | 1.4 | 18.9 |
| IN59, KR98, LH101, SG192 | 105 | 2.5 | 30.8 |
| GR96, HQ188 | 7 | 21.2 | 5.3 |
| GE96, LS205 | 9a | 36.3 | 22.2 |
| GE96, YF110 | 9b | 33.1 | 4.2 |
| VE99, IV194 | 15 | 49.6 | 11.2 |
| VE99, RC158 | 20e | 24.3 | 8.2 |
| AV70, LQ91, VE99 | 21g | 32.8 | 6.9 |
| GR96 | 4b | 5.7 | 19.0 |
| VE99 | 11 | 18.1 | 41.1 |

[0276] The identified substitutions are listed in Table 5 above using the standard one letter amino acid designation of the wild type amino acid residue, followed by the substituted amino acid residue and the corresponding amino acid position. Thus, for example, clone 14 comprises three amino acid substitutions: an arginine for glycine substitution at position 96 (G96R), a serine for threonine at position 103 (T103S) and valine for glutamic acid at position 114 (G114V; SEQ ID NO. 2).

[0277] The ability of each revTetR clone to bind to its cognate tet operator sequence and regulate transcription in a prokaryotic organism, Escherichia coli, in the presence and absence of a tetracycline analog (anhydrotetracycline, atc) was determined (Table 3, FIG. 2). The relative ratios of non-repressed to repressed levels of transcription for the 15 clones range from about 1.4-fold to about 50-fold at 28° C. and from about 1.3-fold to 40-fold at 37° C. For example, clone 4b comprising an amino acid substitution of glutamic acid for glycine at position 96 (e.g., SEQ ID NO. 24) repressed transcription 19-fold at 37° C. but to a less extent at 28° C. (5.7-fold, Table 3). Furthermore, clones 14, 5a and 7 comprising the arginine for glycine substitution at position 96 and further comprising a substitution or substitutions of serine for threonine at position 103 and valine for glutamic acid at position 114; leucine for proline at position 159; or glutamine to histidine at position 188, respectively, have pronouncedly different activities. For instance, the additional substitutions of serine for leucine at position 103 and valine for glutamic acid at position 114 completely abolishes the ability of these revTetR repressors to repress transcription in the presence of tetracycline or tetracycline analog at 37° C. while increasing repression at 28° C. by as much as 2-fold.

[0278] Similarly clones 9a and 9b comprising an amino acid substitution at position 96 (glutamic acid for glycine) and further comprising a substitution serine for leucine at position 205 or phenylalanine for tryptophan at position 110, respectively, have varying activities. For instance, clones 9a and 9b have similar activities at 28° C. (36.3-fold v.33.1-fold) but dramatically different activities at 37° C. (22-fold v. 5-fold). Therefore, the introduction of a substitution of phenylalanine for tryptophan at position 110 modulates the activity of the resulting modified revTetR repressor at 37° C.

[0279] In addition, clone 11 comprising an amino acid substitution of glutamic acid for valine at position 99 (SEQ ID NO. 26) repressed transcription 41-fold at 37° C. and 18-fold at 28° C.; however, clones 15, 20e, and 21g comprising the glutamic acid for valine at position 99 and further comprising a substitution or substitutions of valine for isoleucine at position 194; cysteine for arginine at position 158; or valine for alanine at position 70 and glutamine for leucine at position 91, respectively, also have pronouncedly different activities. For instance, the additional substitution of cysteine for arginine at position 158 increases repression at 28° C. by 50% but reduces the level of repression 5-fold at 37° C. whereas the additional substitution of valine for isoleucine at position 194 increases repression at 28° C. by greater than 2.5-fold but reduces the level of repression 4-fold at 37° C.

[0280] Still further, clone 17a comprising amino acid substitutions of asparagine for isoleucine for position 59, glutamic acid for aspartic acid at position 95, and alanine for histidine at position 100 (e.g., SEQ ID NO. 10) repressed transcription at 28° C. and 37° C. to a similar extent as clone 5a comprising amino acid substitutions arginine for glycine at position 96 and leucine for proline at position 159 (about 9-fold and 20-fold, respectively). In contrast, clone 105 comprising the amino acid substitution of asparagine for isoleucine for position 59, but comprising different substitutions of arginine for lysine at position 98, histidine for leucine at position 101 and glycine for serine at position 192 (e.g., SEQ ID NO. 30) and, valine for alanine at position 71, glycine (GGC) for aspartic acid at position 95, and arginine for leucine at position 127 (e.g., SEQ ID NO. 28) exhibited little to no repression at 28° C. Clone 14 comprising amino acid substitutions of valine for alanine at position 160, valine for aspartic acid at position 178, tryptophan for glycine at position 196 (e.g., SEQ ID NO. 8) had greatly reduces levels of transcription at 28° C. in the presence or absence of tetracycline or tetracycline analog but relatively wild-type levels of transcription at 37° C., though the ratio of non-repressed to repressed levels of transcription was substantially lower than that of wild-type TetR.

[0281] 6.2. Construction, Identification, and Use of Modified Tetracycline Repressors Exhibiting a Reverse Phenotype in Gram Positive Bacteria

[0282] Construction Identification, and Use of revTetR Repressors in Bacillus subtilis

[0283] A pool of mutated Tet repressors is created as in Example 6.1 and cloned into an expression vector comprising a promoter active in Bacillus subtilis, such as but not limited to the xyl-operon promoter of Bacillus, expression may be regulated by particular carbon source, such as xylose, or in other embodiments, maltose. Alternatively, each of the nucleotide sequences of SEQ ID NOS. 1, 3, 5, 7, 9, 11, 13, 15, 17, 19, 21, 23, 25, 27, 29, and 265-458 is operatively associated with a promoter active in Bacillus subtilis, and the recombinant gene expressing a revTetR protein so produced is introduced into Bacillus subtilis to establishing the revTetR phenotype in this host. In preferred embodiments, the promoter active in Bacillus subtilis is regulated by a carbon source selected from the group consisting of xylose and maltose.

[0284] The revTetR phenotype is determined, in certain embodiments, by analyzing the expression of a reporter gene selected from the group consisting of lacZ, GFP, and luxA, that is under the control of a promoter active in Bacillus subtilis, which promoter has been engineered to comprise at least one tetracycline operator sequence. Accordingly, expression of such indicator genes is repressed by a revTetR repressor in the presence of subinhibitory levels of tetracycline, anhydrotetracycline or other suitable tetracycline analogue. In alternative instances, a direct selection, rather than a screen, is established to allow the isolation of the revTetR mutants in Bacillus subtilis using the strategy described above in Section 6.1. For example, an antibiotic resistance gene, such as a gene encoding kanamycin resistance, can be placed under the control of a negative-regulatory element, such as a repressor protein. The repressor protein, in turn is operatively associated with one or more tet operators such that expression of the repressor results in sensitivity of the host cell to, e.g., kanamycin, in the presence of a wild-type TetR protein in the absence of sub-inhibitory levels of tetracycline, anhydrotetracycline, or other suitable tetracycline analog. In this embodiment, revTetR mutants are selected as kanamycin-resistant in the absence of tetracycline, anhydrotetracycline, or other suitable tetracycline analog, and the revTetR phenotype confirmed by demonstrating kanamycin-sensitivity in the presence of sub-inhibitory levels of tetracycline, anhydrotetracycline, or other suitable tetracycline analog.

[0285] Exemplary promoters, which are active in gram positive organisms, such as Bacillus subtilis and that have been modified so as to be placed under tetR regulation include those promoters that have been described (Geissendorfer & Hillen (1990) Appl. Microbiol. Biotechnol. 33: 657-63) as well as the Cad8 operon promoter engineered to contain one or more tet operators.

[0286] In certain embodiments, either one or both of the gene encoding the revTetR repressor and the gene encoding the tetracycline-regulated indicator gene are integrated, for example, into the att site in Bacillus subtilis using bacteriophage Φ11 or, alternatively, integrated into the chromosome via homologous recombination into a specified gene (e.g., amiA gene; see Brucker 1997 FEMS Microbiol. Lett. 151(1): 1-8; Biswas et al. 1993 175(11): 3628-35). In certain other embodiments, either or both of the gene encoding the revTetR repressor and the gene encoding the tetracycline regulated indicator gene are maintained episomally. Both may be episomal and carried on different replicons where the plasmids are compatible and different selectable markers are used. Such recombinant nucleic acids are introduced into Bacillus subtilis or other gram-positive prokaryotic organisms by electroporation, using methods known to those of ordinary skill in the art.

[0287] For example, where the reporter gene expresses β-galactosidase (lacZ), revTetR-encoding genes may be identified using the screen disclosed in EXAMPLE 6.1. Recombinant DNA can be isolated from the identified organisms, and the sequences encoding the revTetR repressors can be determined by methods known in the art.

[0288] Suitable plasmids that may be used for molecular cloning in Bacillus subtilis include chimeric derivatives of plasmids pUB110, pE194, and pSA0501, which encode resistance to kanamycin, erythromycin, and streptomycin, respectively have been described (Gryczan et al. 1980, J. Bacteriol. 141(1): 246-53; Gryczan et al. 1978, J. Bacteriol. 134(l): 318-29; Gryczan et al. 1978 Proc. Natl. Acad. Sci. U.S.A. 75(3): 1428-32). Methods for the direct, positive selection of recombinant plasmids in Bacillus subtilis have also been described, which are based upon pBD124, which encodes resistance to chloramphenicol as well as a wild type thyA protein which confers trimethoprim-sensitivity upon a thyA-thyB Bacillus subtilis host. Accordingly, transformed Bacillus subtilis thyA-thyB host cells carrying a revTetR gene inserted into the Thy gene of pBD124 are selected as resistant to erythromycin and trimethoprim. Other expression systems that are used for expression of revTetR genes in Bacillus subtilis are adapted from those described in U.S. Pat. No. 4,801,537, 4,920,054, and 6,268,169 B1 by removal, or non-incorporation of peptide secretion signals to allow intracellular expression of the encoded revTetR proteins.

[0289] Tet-regulated expression of potential target genes/essential genes in Bacillus subtilis is achieved in one non-limiting example, by allele replacement based upon homologous recombination between non-replicating episomal DNA carrying a tet-operator-regulated essential gene bracketed by DNA sequences found upstream and downstream of the target chromosomal gene. Exemplary target genes include, but are not limited to, rpoA, rpoB, gyrA, gyrB, fabG, fabI, and fusA.

[0290] Construction, Identification, and Use of revTetR Repressors in Staphylococcus aureus

[0291] A pool of mutated Tet repressors is created as in Example 6.1 and cloned into an expression vector comprising a promoter active in Staphylococcus aureus, such as the xyl-operon promoter of Bacillus, expression may be regulated by particular carbon source (xyl/mal). Alternatively, each of the nucleotide sequences of SEQ ID NOS. 1, 3, 5, 7, 9, 11, 13, 15, 17, 19, 21, 23, 25, 27, 29, and 265-458 is operatively associated with a promoter active in Staphylococcus aureus, and the recombinant gene expressing a revTetR protein so produced is introduced into Staphylococcus aureus to confirm the revTetR phenotype in this host. In preferred embodiments, the promoter active in Staphylococcus aureus is regulated by a carbon source selected from the group consisting of xylose and maltose.

[0292] The revTetR phenotype is determined, in certain embodiments, by analyzing the expression of a reporter gene selected from the group consisting of lacZ, GFP, and luxA, that is under the control of a promoter active in Staphylococcus aureus, which promoter has been engineered to comprise at least one tetracycline operator sequence. Accordingly, expression of such indicator genes is repressed by a revTetR repressor in the presence of subinhibitory levels of tetracycline, anhydrotetracycline or other suitable tetracycline analogue. In alternative instances, a direct selection, rather than a screen, is established to allow the isolation of the revTetR mutants in Staphylococcus aureus using the strategy described above in Section 6.1. For example, an antibiotic resistance gene, such as a gene encoding kanamycin resistance, can be place under the control of a negative-regulatory element, such as a repressor protein. The repressor protein, in turn is operatively associated with one or more tet operators such that expression of the repressor results in sensitivity of the host cell to, e.g., kanamycin, in the presence of a wild-type TetR protein in the absence of sub-inhibitory levels of tetracycline, anhydrotetracycline, or other suitable tetracycline analog. In this embodiment, revTetR mutants are selected as kanamycin-resistant in the absence of tetracycline, anhydrotetracycline, or other suitable tetracycline analog, and the revTetR phenotype confirmed by demonstrating kanamycin-sensitivity in the presence of sub-inhibitory levels of tetracycline, anhydrotetracycline, or other suitable tetracycline analog.

[0293] Exemplary promoters, which are active in gram positive organisms, such as Staphylococcus aureus and that have been modified so as to be placed under tetR regulation include those promoters that have been described (Geissendorfer & Hillen (1990) Appl. Microbiol. Biotechnol. 33: 657-63) including the phage T5 promoter engineered to contain one or more tet operators.

[0294] In certain embodiments, either one or both of the gene encoding the revTetR repressor and the gene encoding the tetracycline-regulated indicator gene are integrated, for example, into the chromosome via homologous recombination into a specified gene (e.g., amiA gene) or any non-essential gene. In certain other embodiments, either or both of the gene encoding the revTetR repressor and the gene encoding the tetracycline regulated indicator gene are maintained episomally. Both may be episomal and carried on different replicons where the plasmids are compatible and different selectable markers are used. Such recombinant nucleic acids are introduced into Staphylococcus aureus or other gram-positive prokaryotic organisms by electroporation, using methods known to those of ordinary skill in the art.

[0295] For example, where the reporter gene expresses β-galactosidase (lacZ), revTetR-encoding genes may be identified using the screen disclosed in EXAMPLE 6.1. Recombinant DNA can be isolated from the identified organisms, and the sequences encoding the revTetR repressors can be determined by methods known in the art.

[0296] Suitable plasmids that may be used for molecular cloning in Staphylococcus aureus include chimeric derivatives of plasmids pUB110, pC194, and pT181, which encode resistance to kanamycin+chloramphenicol, chloramphenicol, and tetracycline, respectively. Derivatives of these molecules have been described (Gryczan et al. 1980, J. Bacteriol. 141(1):246-53; Gryczan et al. 1978, J. Bacteriol. 134(1): 318-29; Gryczan et al. 1978 Proc. Natl. Acad. Sci. U.S.A. 75(3): 1428-32). Plasmid pT181 is a naturally-occurring Staphylococcus aureus plasmid that has a copy number of about 20 and belongs to the incompatibility group Inc3. This plasmid has been sequenced and shown to have 4,437 bp (Khan et al. 1983, Plasmid 10: 251-59). Plasmid pUB110 is a Staphylococcus aureus plasmid having a molecular weight of about 3×10⁶ daltons, and encodes resistance to kanamycin and chloramphenicol (Keggins et al. 1978, Proc. Natl. Acad. Sci. U.S.A. 75: 1423-27; Zyprian et al. 1983, Plasmid 10: 145-59). Plasmid pC194 is a low-molecular weight plasmid (about 2×10⁶ daltons) encoding chloramphenicol resistance, that replicates in Bacillus subtilis as well as in Staphylococcus aureus.

[0297] Recombinant DNA molecules are introduced into Staphylococcus aureus strains by transformation using, for example, electroporation. Suitable Staphylococcus aureus host strains include, but are not limited to RN450, RN4220 and N315.

[0298] Tet-regulated expression of potential target genes/essential genes in Staphylococcus aureus is achieved in one non-limiting example, by allele replacement based upon homologous recombination between non-replicating episomal DNA carrying a tet-operator-regulated essential gene bracketed by DNA sequences found upstream and downstream of the target chromosomal gene. In other instances, plasmid vectors that replicate only at low temperature by a rolling-circle model are integrated into the Staphylococcus aureus genome at high temperature (37° C.) to form integrants. The temperature is lowered to induce rolling-circle replication leading to excision of the integrated plasmid and, ultimately loss of the plasmid and allele replacement in which a plasmid-borne (recombinant) copy of a gene is substituted for the wild-type genomic copy of that gene (Brucker 1997 FEMS Microbiol. Lett. 151(1): 1-8; Biswas et al. 1993 175(11): 3628-35). In this manner, a wild-type target gene, which may be an essential gene and/or a gene required for virulence or pathogenicity, is replaced with a recombinant gene comprising one or more tet operators functionally associated with that gene. Accordingly, expression of the gene required for virulence or pathogenicity is modulated by the presence of a revTetR repressor protein combined with sub-inhibitory levels of tetracycline, anhydrotetracycline or other suitable tetracycline-like molecule. Expression of the target gene is repressed to a low level, for example, to provide as test strain that is extraordinarily sensitive to inhibitors of the product encoded by the target gene. Exemplary target genes include, but are not limited to, rpoA, rpoB, gyrA, gyrB, fabG, fabI, and fusA.

[0299] Construction Identification, and Use of revTetR Repressors in Enterococcus faecalis

[0300] A pool of mutated Tet repressors is created as in Example 6.1 and cloned into an expression vector comprising a promoter active in Enterococcus faecalis, such as the Lactococcus lactis P59 promoter, the Enterococcus bacA promoter, the Lactococcal nisin promoter (PnisA), and the pheromone-inducible prgX promoter (Bae et al. 2000, J. Mol. Biol. 297: 861-79). Each of these promoters can be genetically engineered to include one or more tetracycline operators, providing a tetracycline-regulated derivative thereof. Alternatively, each of the nucleotide sequences of SEQ ID NOS. 1, 3, 5, 7, 9, 11, 13, 15, 17, 19, 21, 23, 25, 27, 29, and 265-458, is operatively associated with a promoter active in Enterococcus faecalis, such as those provided above, and the recombinant gene expressing a revTetR protein so produced is introduced into Enterococcus faecalis to confirm the revTetR phenotype in this host. In preferred embodiments, the promoter active in Enterococcus faecalis is regulated; for example, the level of transcription from a prgX promoter, which can be induced by pheromones (Bae et al. 2000, J. Mol. Biol. 297: 861-79).

[0301] The revTetR phenotype is determined, in certain embodiments, by analyzing the expression of a reporter gene selected from the group consisting of lacZ, GFP, and luxA, that is under the control of a promoter active in Enterococcus faecalis, which promoter has been engineered to comprise at least one tetracycline operator sequence. Accordingly, expression of such indicator genes is repressed by a revTetR repressor in the presence of subinhibitory levels of tetracycline, anhydrotetracycline or other suitable tetracycline analogue. In alternative instances, a direct selection, rather than a screen, is established to allow the isolation of the revTetR mutants in Enterococcus faecalis using the strategy described above in Section 6.1. For example, an antibiotic resistance gene, such as a gene encoding kanamycin resistance, can be place under the control of a negative-regulatory element, such as a repressor protein. The repressor protein, in turn is operatively associated with one or more tet operators such that expression of the repressor results in sensitivity of the host cell to, e.g., kanamycin, in the presence of a wild-type TetR protein in the absence of sub-inhibitory levels of tetracycline, anhydrotetracycline, or other suitable tetracycline analog. In this embodiment, revTetR mutants are selected as kanamycin-resistant in the absence of tetracycline, anhydrotetracycline, or other suitable tetracycline analog, and the revTetR phenotype confirmed by demonstrating kanamycin-sensitivity in the presence of sub-inhibitory levels of tetracycline, anhydrotetracycline, or other suitable tetracycline analog.

[0302] Exemplary promoters, which are active in the gram negative organism, Enterococcus faecalis, are modified so as to be placed under tetR regulation; examples of such exemplary promoters are provided above, and each of these promoters can be engineered to include one or more tet operators to provide a tetracycline-regulated promoter that can be operatively associated with a target or indicator gene of interest.

[0303] In certain embodiments, either one or both of the gene encoding the revTetR repressor and the gene encoding the tetracycline-regulated indicator gene are integrated into the Enterococcus faecalis chromosome via homologous recombination. In certain other embodiments, either or both of the gene encoding the revTetR repressor and the gene encoding the tetracycline regulated indicator gene are maintained episomally. Both may be episomal and carried on different replicons where the plasmids are compatible and different selectable markers are used. Plasmid vectors useful for recombinant DNA expression and gene transfer in Enterococcus faecalis include but are not limited to Enterococcus/E. coli shuttle vectors, such as those based upon pAM401 (e.g. pMGS100 and pMGS101; Fujimoto et al. 2001, Appl. Environ. Microbiol. 67: 1262-67), vectors comprising the nisin promoter (Bryan et al. 2000, Plasmid, 44: 183-90 (Eichenbaum et al. 1998, Appl. Environ. Microbiol. 64: 2763-69), and conjugative plasmids, such pCF10, which comprises a pheromone-inducible tetracycline resistance gene (Chung et al. 1995, J. Bacteriol. 177: 2107-17; also see Manganelli et al. 1998 FEMS Microbiol. Lett. 168(2): 259-68; Chaffin et al. 1998, Gene 219(1-2): 91-99; and Poyart et al. 1997 FEMS Microbiol Lett. 1562(2): 193-98). Such recombinant nucleic acids are introduced into Enterococcus faecalis or other gram-positive prokaryotic organisms by electroporation, using methods known to those of ordinary skill in the art (e.g. Manganelli et al. 1998 FEMS Microbiol. Lett. 168(2): 259-68). Suitable markers useful for selection in Enterococcus faecalis include, but are not limited to, tetracycline resistance, kanamycin resistance, erythromycin resistance, and streptomycin resistance. Appropriate Enterococcus faecalis host strains include, but are not limited to OG1RF, which is described in Dunny et al. (Dunny et al. 1981, Plasmid 6: 270-78). One example of a suitable growth medium for propagation of Enterococcus faecalis is Todd-Hewitt Broth (THB) (see Dunney et al. 1985, Proc. Natl. Acad. Sci. U.S.A. 82: 8582-86).

[0304] For example, where the reporter gene expresses β-galactosidase (lacZ), revTetR-encoding genes may be identified using the screen disclosed in EXAMPLE 6.1. Recombinant DNA can be isolated from the identified organisms, and the sequences encoding the revTetR repressors can be determined by methods known in the art.

[0305] Tet-regulated expression of potential target genes/essential genes in Enterococcus faecalis is achieved in one non-limiting example, by allele replacement based upon homologous recombination between non-replicating episomal DNA carrying a tet-operator-regulated essential gene bracketed by DNA sequences found upstream and downstream of the target chromosomal gene. Exemplary target genes include, but are not limited to, rpoA, rpoB, gyrA, gyrB, fabG, fabI, and fusA. Modulation of the expression of such target genes can be performed, as noted above, to provide a host strain in which the gene product of the target gene is rate-limiting for growth and/or virulence and which serves as an indicator strain for the detection of compounds active against the product encoded by the target gene.

[0306] 6.3. Construction, Identification, and Use of Modified Tetracycline Repressors Exhibiting a Reverse Phenotype in Gram Negative Bacteria

[0307] Construction, Identification, and Use of revTetR Repressors in Pseudomonas aeruginosa

[0308] A pool of mutated Tet repressors is created as in Example 6.1 and cloned into an expression vector comprising a promoter active in Pseudomonas aeruginosa, such as the T7 promoter of E. coli bacteriophage T7 or the recA promoter. Alternatively, each of the nucleotide sequences of SEQ ID NOS. 1, 3, 5, 7, 9, 11, 13, 15, 17, 19, 21, 23, 25, 27, 29, and 265-458, is operatively associated with a promoter active in Pseudomonas aeruginosa, such as the T7 and recA promoter, and the recombinant gene expressing a revTetR protein so produced is introduced into Pseudomonas aeruginosa to confirm the revTetR phenotype in this host. In preferred embodiments, the promoter active in Pseudomonas aeruginosa is regulated; for example, the level of transcription from a recA-promoter can be induced by exposing the host cell to nalidixic acid.

[0309] The revTetR phenotype is determined, in certain embodiments, by analyzing the expression of a reporter gene selected from the group consisting of lacZ, GFP, and luxA, that is under the control of a promoter active in Pseudomonas aeruginosa, which promoter has been engineered to comprise at least one tetracycline operator sequence. Accordingly, expression of such indicator genes is repressed by a revTetR repressor in the presence of subinhibitory levels of tetracycline, anhydrotetracycline or other suitable tetracycline analogue. In alternative instances, a direct selection, rather than a screen, is established to allow the isolation of the revTetR mutants in Pseudomonas aeruginosa using the strategy described above in Section 6.1. For example, an antibiotic resistance gene, such as a gene encoding kanamycin resistance, can be place under the control of a negative-regulatory element, such as a repressor protein. The repressor protein, in turn is operatively associated with one or more tet operators such that expression of the repressor results in sensitivity of the host cell to, e.g., kanamycin, in the presence of a wild-type TetR protein in the absence of sub-inhibitory levels of tetracycline, anhydrotetracycline, or other suitable tetracycline analog. In this embodiment, revTetR mutants are selected as kanamycin-resistant in the absence of tetracycline, anhydrotetracycline, or other suitable tetracycline analog, and the revTetR phenotype confirmed by demonstrating kanamycin-sensitivity in the presence of sub-inhibitory levels of tetracycline, anhydrotetracycline, or other suitable tetracycline analog.

[0310] Exemplary promoters, which are active in the gram negative organism, Pseudomonas aeruginosa, are modified so as to be placed under tetR regulation; examples of such promoters include but are not limited to the T7, mini-T7, anaerobically-inducible arcDABC operon promoter, the lac-repressor -regulated trc promoter, and the nalidixic-acid-inducible recA promoter (see Hoang et al., 2000, Plasmid, 43: 59-72); each of these promoters can be engineered to include one or more tet operators to provide a tetracycline-regulated promoter that can be operatively associated with a target or indicator gene of interest.

[0311] In certain embodiments, either one or both of the gene encoding the revTetR repressor and the gene encoding the tetracycline-regulated indicator gene are integrated into the Pseudomonas aeruginosa chromosome via homologous recombination or by using integration-proficient plasmids such as, but not limited to, mini-CTX1 and mini-CTX2 (Hoang et al. 2000 Plasmid 45: 59-72. In certain other embodiments, either or both of the gene encoding the revTetR repressor and the gene encoding the tetracycline regulated indicator gene are maintained episomally. Both may be episomal and carried on different replicons where the plasmids are compatible and different selectable markers are used. Such recombinant nucleic acids are introduced into Pseudomonas aeruginosa or other gram-negative prokaryotic organisms by electroporation, using methods known to those of ordinary skill in the art. Suitable selective markers useful for selection in Pseudomonas aeruginosa include, but are not limited to, tetracycline resistance, ampicillin resistance, and streptomycin resistance. Appropriate Pseudomonas aeruginosa host strains include, but are not limited to, ADD1976 and PAO1. One example of a suitable growth medium is LB medium, which includes, per liter, 10 g tryptone, 5 g yeast extract, and 5 g sodium chloride; this medium is generally supplemented with a carbon source, such as glucose or glycerol (e.g. to a level of 0.2% ) as desired.

[0312] Where the reporter gene expresses β-galactosidase (lacZ), revTetR-encoding genes may be identified using the screen disclosed in EXAMPLE 6.1. Recombinant DNA can be isolated from the identified organisms, and the sequences encoding the revTetR repressors can be determined by methods known in the art.

[0313] Suitable plasmid vectors useful for molecular cloning in Pseudomonas aeruginosa include Pseudomonas—E. coli shuttle vectors such as but not limited to pUCP19 derivatives such as pUCPKS, and pUCPSK (Watson et al. Gene 172: 163-64), IncQ-compatiblity plasmids comprising the arcDABC operon promoter (Winteler et al. 1996, Appl. Environ. Microbiol. 62: 3391-98), vectors comprising the nalidixic acid inducible recA promoter (Rangwala et al. 1991, Biotechnology, 2: 477-79), and plasmids pUM505 and pSUP104, which encode chromate resistance (Cervantes et al. 1990, J. Bacteriol. 172: 287-91).

[0314] Tet-regulated expression of potential target genes/essential genes in Pseudomonas aeruginosa is achieved in one non-limiting example, by allele replacement based upon homologous recombination between non-replicating episomal DNA carrying a tet-operator-regulated essential gene bracketed by DNA sequences found upstream and downstream of the target chromosomal gene. Exemplary target genes include, but are not limited to, rpoA, rpoB, gyrA, gyrB, fabG, fabI, and fusA. Modulation of the expression of such target genes can be performed, as noted above, to provide a host strain in which the gene product of the target gene is rate-limiting for growth and/or virulence and which serves as an indicator strain for the detection of compounds active against the product encoded by the target gene.

[0315] 6.4 Construction of RevTetR Proteins Using Oligonucleotide directed Randomization Mutagenesis

[0316] Random mutations were introduced into three distinct regions of the DNA sequence encoding TetR. Mutagenesis within each region of the TetR coding region was carried out according to the “three-primer” method of Landt et al. (Landt et al. (1990) “A General Method for Rapid Site-directed Mutagenesis Using the Polymerase Chain Reaction,” Gene 96: 125-128, which is hereby incorporated by reference in its entirety). The three regions subjected to this site-directed mutagenic procedure were the coding regions for amino acids 14-25, for amino acids 48-63, and for amino acids 93-102. In each instance three oligonucleotides were prepared. Two of the oligonucleotides were upstream and downstream PCR primers for the region to be mutagenized. The third, mutagenic, “partially randomized” primer was synthesized so as to contain, at each nucleotide position within the sequence for the region to be mutagenized, approximately 85% wild-type base with the remainder distributed among the other three, non-wild type bases for that position. For example, the partially randomized primer used for mutagenesis of the coding region for amino acids 48-63 of SEQ ID NO: 32 had the following nucleotide sequence (SEQ ID NO: 459):

[0317] 5′-ATAATCATGATGACGCGCCAAGATCTCCACCGCCAGCGCATCCAGTAGGGCCCGCTTATTTTTTAC-3′,

[0318] wherein each underlined base was present in approximately 85% of the oligonucleotides, while the remaining approximately 15% of the oligonucleotides contained one of the other three, non-wild type bases at that position. Similar mutagenic, partially randomized oligonucleotides were prepared for mutagenesis of the coding regions for amino acids 14-25 and 93-102. It was predicted that, according to a binomial distribution, each oligonucleotide would contain three to four mutations. PCR amplification reactions were carried out using the three indicated oligonucleotides (upstream, downstream, and mutagenic partially randomized oligonucleotide primers) according to the method of Landt using pWH1411 plasmid DNA as template. Accordingly, three PCR products comprising mutagenized sequences were obtained corresponding, respectively, to the coding regions for amino acids 14-25, 48-63, and 93-102. Each pool was separately cloned into the corresponding region of the TetR coding sequence. In addition, each of the three possible pairs (coding regions for amino acids 14-25 and 48-63; coding regions for amino acids 14-25 and 93-102; and coding regions for amino acids 48-63 and 93-102) of PCR products were also inserted, using genetic engineering methodology, into the coding region of the TetR protein. All six pools of mutagenized TetR sequences were screened for TetR variants having a reverse phenotype. Transformed strains are analyzed using the materials and methods disclosed in Section 6.1, above. Isolates carrying mutant TetR proteins exhibiting a reverse phenotype that were obtained using this procedure include those designated TetRevAtc4-1 to TetRevAF6/5 of Tables 1, 2, and 6. More specifically, the clone designation, SEQ ID NO:, and identified amino acid substitution(s) are provided in Table 1; the clone designation, SEQ ID NO:, and identified nucleotide substitution(s) are provided in Table 2; and the clone designation and activity of non-repressed and repressed levels of β-galactosidase activity (i.e. in the absence and in the presence of anhydrotetracycline) are shown in Table 6, below.

[0319] 6.5 Construction of RevTetR Proteins Using Oligonucleotide directed Randomization Mutagenesis of the Coding Sequence for Amino Acid 96 and Amino Acid 96 and 99

[0320] Site specific mutagenesis was also carried out that was directed toward either the codon for amino acid 96 alone or for codons 96 and 99 simultaneously. Again, the site-directed mutagenesis was carried out according to the “three-primer” method of Landt. However, in this instance, the mutagenic oligonucleotide was randomized only with respect to the particular codon or pair of codons to be mutagenized; in each case the wild type sequence was replace with the triplet NNS (where N is any nucleotide, i.e. A, T, G, or C, and S is the single-letter code indicating that the nucleotide at this position is either C or G). Plasmid DNA (pWH1411) was used as the template for the PCR amplification reactions. Transformed strains are analyzed using the materials and methods disclosed in Section 6.1, above. Isolates carrying mutant TetR proteins exhibiting a reverse phenotype that were obtained using this procedure include those designated TetRev 96/99-1 to TetRev 96/99-P of Tables 1, 2, and 6. More specifically, the clone designation, SEQ ID NO., and identified amino acid substitution(s) are provided in Table 1; the clone designation, SEQ ID NO., and identified nucleotide substitution(s) are provided in Table 2; and the clone designation and activity of non-repressed and repressed levels of β-galactosidase activity (i.e. in the absence and in the presence of anhydrotetracycline) are shown in Table 6:

TABLE 6
β-Galactosidase Activity of RevTetR Isolates
Cultured in the Presence and the
Absence of Anhydrotetracycline (ATC)

| | Cultured | Standard | Cultured | Standard |
|---|---|---|---|---|
| | Without | Deviation | With | Deviation |
| RevTetR Isolate | ATC | (without ATC) | ATC | (with ATC) |
| TetRrevAtc4-1 | 100.076 | 3.2043 | 6.9011 | 3.4749 |
| TetRrevAtc4-10 | 69.401 | 3.557 | 11.275 | 0.576 |
| TetRrevAtc4-11 | 103.132 | 4.935 | 17.479 | 1.119 |
| TetRrevAtc4-13 | 98.8175 | 10.634 | 8.1397 | 0.294 |
| TetRrevAtc4-14 | 62.985 | 1.189 | 25.025 | 0.754 |
| TetRrevAtc4-16 | 104.174 | 1.8764 | 16.914 | 0.2459 |
| TetRrevAtc4-2 | 3.14294 | 1.1491 | 0.9516 | 0.0843 |
| TetRrevAtc4-20 | 78.478 | 3.34 | 8.048 | 0.754 |
| TetRrevAtc4-21 | 104.757 | 5.262 | 16.831 | 1.603 |
| TetRrevAtc4-22 | 80.2859 | 1.7426 | 3.7584 | 0.5517 |
| TetRrevAtc4-23 | 105.95 | 8.641 | 21.606 | 1.904 |
| TetRrevAtc4-24 | 61.649 | 4.011 | 13.63 | 0.271 |
| TetRrevAtc4-25 | 98.629 | 4.534 | 12.116 | 0.833 |
| TetRrevAtc4-28 | 85.141 | 1.931 | 4.217 | 0.251 |
| TetRrevAtc4-31 | 65.039 | 10.041 | 2.181 | 0.163 |
| TetRrevAtc4-4 | 70.5665 | 2.253 | 2.5363 | 0.2812 |
| TetRrevAtc4-40 | 56.743 | 4.67 | 14.428 | 2.894 |
| TetRrevAtc4-43 | 99.61 | 10.258 | 13.878 | 0.611 |
| TetRrevAtc4-47 | 83.987 | 8.117 | 13.969 | 1.868 |
| TetRrevAtc4-48 | 110.179 | 1.696 | 16.146 | 1.515 |
| TetRrevAtc4-5 | 98.272 | 3.25 | 12.552 | 0.342 |
| TetRrevAtc4-52 | 105.367 | 0.999 | 5.575 | 0.604 |
| TetRrevAtc4-53 | 87.055 | 0.965 | 6.945 | 1.407 |
| TetRrevAtc4-6 | 108.478 | 7.148 | 23.873 | 0.573 |
| TetRrevAtc4-61 | 88.785 | 2.032 | 23.831 | 3.674 |
| TetRrevAtc4-67 | 61.815 | 6.352 | 12.616 | 1.458 |
| TetRrevAtc4-7 | 84.416 | 4.208 | 27.649 | 1.619 |
| TetRrevAtc4-70 | 16.119 | 0.847 | 11.125 | 0.834 |
| TetRrevAtc4-71 | 70.197 | 1.416 | 7.372 | 4.434 |
| TetRrevAtc4-9 | 97.1039 | 2.5704 | 1.8695 | 0.0705 |
| TetRrevAtc4-9b | 107.982 | 4.4152 | 1.0594 | 0.1013 |
| TetRrevDox4-1 | 36.03 | 1.518 | 5.627 | 0.316 |
| TetRrevDox4-2 | 58.776 | 4.54 | 9.547 | 0.705 |
| TetRrev04-1 | 102.092 | 2.934 | 44.145 | 1.246 |
| TetRrev04-4 | 99.655 | 3.09 | 19.878 | 4.306 |
| TetRrev6-13 | 15.7835 | 0.859 | 2.5043 | 0.1865 |
| TetRrev6-17 | 56.5081 | 1.4194 | 12.5 | 1.4 |
| TetRrev6-2 | 95.487 | 3.355 | 18.3 | 6.815 |
| TetRrev6-23 | 101 | 4.9 | 49 | 2 |
| TetRrev6-25 | 42.8584 | 1.5726 | 4.136 | 0.256 |
| TetRrev6-26 | 53.6535 | 4.9827 | 6.9688 | 0.3698 |
| TetRrev6-27 | 108.105 | 10.073 | 44.43 | 16.272 |
| TetRrev6-3 | 23.0695 | 4.7672 | 1.3657 | 0.3418 |
| TetRrev6-31 | 55.658 | 0.825 | 35.26 | 9.053 |
| TetRrev6-32 | 79.3731 | 3.2936 | 3.789 | 0.165 |
| TetRrev6-33 | 108.964 | 5.645 | 2.984 | 0.213 |
| TetRrev6-34 | 85.725 | 2.248 | 40.254 | 3.489 |
| TetRrev6-35 | 74.8797 | 8.3714 | 7.0255 | 0.462 |
| TetRrev6-37-1 | 55.277 | 6.786 | 20.04 | 2.14 |
| TetRrev6-38 | 96.194 | 2.689 | 46.91 | 9.409 |
| TetRrev6-50 | 60.464 | 2.328 | 2.469 | 1.081 |
| TetRrev6-51 | 93.974 | 3.312 | 4.499 | 0.845 |
| TetRrev6-53 | 107.107 | 3.239 | 27.918 | 2.095 |
| TetRrev6-54 | 6.393 | 0.923 | 1.268 | 0.019 |
| TetRrev4/6-3 | 69.291 | 9.307 | 0.878 | 0.096 |
| TetRrev4/6-4 | 96.491 | 1.081 | 1.639 | 0.203 |
| TetRrev4/6-5 | 97.92 | 3.486 | 5.7 | 0.321 |
| TetRrev4/6-6 | 67.879 | 5.678 | 3.197 | 0.161 |
| TetRrev4/6-7 | 86.036 | 2.657 | 2.151 | 0.119 |
| TetRrev4/6-10 | 97.964 | 1.525 | 6.149 | 0.293 |
| TetRrev4/6-15 | 66.054 | 2.358 | 7.647 | 0.266 |
| TetRrev4/6-17 | 54.403 | 6.124 | 2.601 | 0.149 |
| TetRrev4/6-24 | 95.596 | 0.889 | 2.428 | 0.067 |
| TetRrev4/6-25 | 102.926 | 3.614 | 3.433 | 0.044 |
| TetRrev4/6-27 | 108 | 10 | 49 | 4.8 |
| TetRrev1/34 | 79.3141 | 3.7375 | 0.9226 | 0.011 |
| TetRrev3/38 | 97.043 | 1.9557 | 1.8287 | 0.3367 |
| TetRrev19/48 | 79.9581 | 3.4181 | 1.1143 | 0.0463 |
| TetRrev22/5 | 92.312 | 2.3888 | 0.9755 | 0.0213 |
| TetRrev25/43 | 99.1241 | 7.9256 | 1.7535 | 0.083 |
| TetRrev28/8 | 98.6289 | 4.9401 | 4.4123 | 0.3144 |
| TetRrev28/16 | 96.3269 | 1.2921 | 0.9453 | 0.0233 |
| TetRrev28/23 | 92.2055 | 2.5032 | 2.9867 | 0.0966 |
| TetRrev28/26 | 89.3918 | 1.8774 | 3.8006 | 0.0692 |
| TetRrev28/27 | 95.0152 | 4.3584 | 1.6907 | 0.0693 |
| TetRrev28/30 | 55.1783 | 5.2783 | 3.7384 | 0.0407 |
| TetRrev28/31 | 99.8749 | 1.4435 | 1.1121 | 0.0621 |
| TetRrev28/36 | 65.5335 | 2.7194 | 1.0579 | 0.0548 |
| TetRrev28/40 | 91 .691 | 2.3601 | 3.4834 | 0.8788 |
| TetRrev28/41 | 15.4643 | 1.2494 | 5.6333 | 0.1529 |
| TetRrev28/46 | 95.9627 | 2.011 | 1.1482 | 0.0337 |
| TetRrev28/48 | 99.3107 | 2.4637 | 1.1587 | 0.051 |
| TetRrev28/49 | 62.5137 | 5.9944 | 8.2716 | 0.2795 |
| TetRrev29/9 | 74.4357 | 3.6638 | 11.772 | 0.7402 |
| TetRrev29/17 | 44.6409 | 5.7567 | 1.7738 | 0.0666 |
| TetRrev29/24 | 85.5708 | 4.1606 | 7.9819 | 1.0449 |
| TetRrev29/25 | 92.9327 | 3.2324 | 3.112 | 0.4435 |
| TetRrev29/27 | 82.7579 | 3.671 | 9.453 | 0.4703 |
| TetRrev29/35 | 58.0891 | 2.6235 | 2.1051 | 0.1521 |
| TetRrev29/42 | 96.187 | 1.9875 | 11.861 | 4.2925 |
| TetRrev29/52 | 48.4964 | 2.7558 | 3.3035 | 0.2923 |
| TetRrevAD1/2 | 84.85 | 2.0606 | 1.6137 | 0.7902 |
| TetRrevAD1/6 | 85.6043 | 0.8583 | 2.5079 | 0.1054 |
| TetRrevAF1/7 | 72.199 | 0.6256 | 2.2753 | 0.0949 |
| TetRrevAF1/8 | 42.088 | 1.3939 | 1.1643 | 0.0385 |
| TetRrevAF1/11 | 96.2362 | 4.9178 | 1.1578 | 0.0062 |
| TetRrevAF2/5 | 97.8373 | 0.9757 | 2.4067 | 0.1718 |
| TetRrevAD2/4 | 32.2603 | 2.2984 | 1.0068 | 0.0326 |
| TetRrevAD2/6 | 89.5374 | 4.1857 | 3.8811 | 0.0424 |
| TetRrevAD2/12 | 73.5981 | 1.6391 | 1.2806 | 0.0064 |
| TetRrevAD2/13 | 71.1255 | 1.2898 | 1.3355 | 0.0277 |
| TetRrevAD2/2 | 94.968 | 0.902 | 5.2312 | 0.3179 |
| TetRrevAF1/3 | 59.773 | 1.257 | 1.2536 | 0.0174 |
| TetRrevAF1/4 | 81.2613 | 2.204 | 13.459 | 0.509 |
| TetRrevAF1/5 | 102.015 | 8.58 | 1.1988 | 0.0833 |
| TetRrevAD3/2 | 60.3284 | 4.1931 | 3.5891 | 0.1647 |
| TetRrevAF2/7 | 70.3163 | 4.5063 | 2.8977 | 0.2432 |
| TetRrevAF6/12 | 82.6734 | 10.966 | 1.3259 | 0.0137 |
| TetRrevAF7/1 | 89.3536 | 6.1618 | 1.3792 | 0.0548 |
| TetRrevAF7/2 | 58.8637 | 6.1831 | 3.7321 | 0.3709 |
| TetRrevAD3/5 | 89.8129 | 4.6758 | 1.1481 | 0.0472 |
| TetRrevAD3/6 | 93.0552 | 7.6646 | 1.6494 | 0.0369 |
| TetRrevAD3/7 | 73.4537 | 5.3256 | 2.4531 | 0.3358 |
| TetRrevAD3/8 | 65.0174 | 2.4169 | 1.9046 | 0.2399 |
| TetRrevAF2/14 | 90.5688 | 1.1264 | 1.239 | 0.0063 |
| TetRrevAF2/15 | 82.5755 | 2.0008 | 2.828 | 0.1574 |
| TetRrevAF2/16 | 90.6438 | 3.6313 | 2.622 | 0.1294 |
| TetRrevAF3/5 | 101.824 | 3.9 | 4.696 | 1.4121 |
| TetRrevAD3/9 | 60.2932 | 2.0912 | 4.2427 | 0.2096 |
| TetRrevAD3/10 | 89.1669 | 4.4232 | 3.5004 | 0.0747 |
| TetRrevAF3/6 | 77.2272 | 1.5973 | 1.0546 | 0.0305 |
| TetRrevAF3/8 | 95.5476 | 4.2398 | 2.7257 | 0.208 |
| TetRrevAF4/4 | 94.4528 | 5.0745 | 3.8273 | 0.4438 |
| TetRrevAF4/5 | 105.33 | 5.7659 | 0.9927 | 0.0229 |
| TetRrevAF4/6 | 100.702 | 5.712 | 3.7257 | 0.2822 |
| TetRrevAF4/9 | 110.616 | 4.8699 | 1.3761 | 0.0546 |
| TetRrevAD2/5 | 50.466 | 0.7082 | 1.4141 | 0.0554 |
| TetRrevAD2/8 | 73.8584 | 3.1264 | 1.8468 | 0.1056 |
| TetRrevAD2/1 | 34.2242 | 1.7633 | 1.17 | 0.0786 |
| TetRrevAF4/13 | 98.8886 | 3.559 | 2.5827 | 0.0302 |
| TetRrevAF5/1 | 100.053 | 6.8865 | 1.072 | 0.0294 |
| TetRrevAF5/3 | 58.5651 | 3.8923 | 1.8337 | 0.0109 |
| TetRrevAF5/5 | 100.546 | 6.1541 | 1.6948 | 0.0753 |
| TetRrevAF5/13 | 105.942 | 7.7376 | 4.4642 | 0.3006 |
| TetRrevAF6/1 | 72.8186 | 3.8996 | 3.7966 | 0.0857 |
| TetRrevAF6/5 | 102.848 | 2.9009 | 2.8572 | 0.2495 |
| TetRrev96/99-1 | 58.4545 | 2.5556 | 25.484 | 1.5401 |
| TetRrev96/99-2 | 94.5832 | 8.2982 | 31.604 | 1.3004 |
| TetRrev96/99-3 | 103.749 | 3.0429 | 31.808 | 0.5679 |
| TetRrev96/99-4 | 109.291 | 3.0636 | 32.997 | 0.5983 |
| TetRrev96/99-5 | 57.8391 | 3.2552 | 17.087 | 1.2772 |
| TetRrev96/99-6 | 103.602 | 2.0728 | 28.364 | 0.9685 |
| TetRrev96/99-7 | 55.0127 | 5.0167 | 13.224 | 0.4851 |
| TetRrev96/99-8 | 103.657 | 2.4813 | 24.309 | 0.6575 |
| TetRrev96/99-9 | 71.6829 | 1.566 | 14.528 | 0.7889 |
| TetRrev96/99-10 | 106.137 | 4.517 | 20.797 | 2.1892 |
| TetRrev96/99-11 | 97.6643 | 2.1647 | 18.656 | 0.7293 |
| TetRrev96/99-12 | 102.406 | 3.3595 | 18.841 | 0.6756 |
| TetRrev96/99-13 | 103.963 | 2.0753 | 16.95 | 0.8005 |
| TetRrev96/99-14 | 110.999 | 1.9805 | 14.693 | 0.3837 |
| TetRrev96/99-15 | 110.413 | 5.3214 | 14.218 | 0.9044 |
| TetRrev96/99-16 | 93.7512 | 3.5679 | 9.8301 | 0.6439 |
| TetRrev96/99-17 | 92.9198 | 1.8727 | 8.4558 | 0.0755 |
| TetRrev96/99-18 | 85.7142 | 4.2359 | 7.5138 | 1.126 |
| TetRrev96/99-19 | 95.188 | 1.0819 | 7.4009 | 0.1084 |
| TetRrev96/99-20 | 81.8583 | 2.1543 | 3.0074 | 0.1654 |
| TetRrev96P | 24.1109 | 0.9607 | 4.1882 | 2 |

[0321] The present invention is not to be limited by the scope of the specific embodiments described herein. Indeed, various modifications of the invention in addition to those described herein will become apparent to those of skill in the art from the foregoing description and accompanying figures. Such modifications are intended to fall within the scope of the appended claims.

[0322] Various publications are cited herein, the disclosures of which are hereby incorporated by reference in their entireties.

What is claimed is:

1. An isolated nucleic acid that comprises a nucleotide sequence selected from the group consisting of SEQ ID NO: 1, 3, 5, 7, 9, 11, 13, 15, 17, 19, 21, 23, 25, 27, 29, or 265-458 or a nucleotide sequence that encodes an amino acid sequence selected from the group consisting of SEQ ID NO: 2, 4, 6, 8, 10, 12, 14, 16, 18, 20, 22, 24, 26, 28, 30, or 71-264.

2. An isolated nucleic acid that encodes a modified tetracycline repressor that:
(i) binds to a tetracycline operator sequence in a prokaryotic organism with a greater affinity in the presence of tetracycline or a tetracycline analog than in the absence of tetracycline or a tetracycline analog;
(ii) comprises at least one amino acid substitution that corresponds to an amino acid substitution present in an amino acid sequence selected from the group consisting of SEQ ID NO: 2, 4, 6, 8, 10, 12, 14, 16, 18, 20, 22, 24, 26, 28, 30 and 71-264; and wherein said nucleic acid
(iii) hybridizes under high stringency over substantially the entire length to a nucleic acid probe consisting of SEQ ID NO: 31, or
(iv) has at least 60 % nucleotide sequence identity to SEQ ID NO: 31.

3. An isolated nucleic acid that encodes a modified tetracycline repressor that
(i) binds to a tetracycline operator sequence in a prokaryotic organism with a greater affinity in the presence of tetracycline or a tetracycline analog than in the absence of tetracycline or a tetracycline analog; and
(ii) comprises at least one amino acid substitution that corresponds to an amino acid substitutions present in an amino acid sequence selected from the group consisting of SEQ ID NO: 2, 4, 6, 8, 10, 12, 14, 16, 18, 20, 22, 24, 26, 28, 30 and 71-264 as compared to an unmodified tetracycline repressor of any one of tet(A), tet(B), tet(C), tet(D), Tet(E), tet(G), tet(H), tet(J), or tet(Z) family.

4. The isolated nucleic acid of claim 3, wherein the unmodified tetracycline repressor comprises an amino acid sequence selected from the group consisting of SEQ ID NO: 34, 36, 38, 40, 42, 44, 46, 48 and 50.

5. The isolated nucleic acid of claim 3, wherein the nucleic acid
(i) hybridizes under high stringency over substantially the entire length to a nucleic acid probe consisting of a nucleotide sequence selected from the group consisting of SEQ ID NO: 33, 35, 37, 39, 41, 43, 45, 47, and 49, or
(ii) has at least 80% nucleotide sequence identity to a nucleic acid selected from the group consisting of SEQ ID NO: 33, 35, 37, 39, 41, 43, 45, 47, and 49; or
(iii) encodes a polypeptide that has at least 80% amino acid sequence identity to a peptide sequence selected from the group consisting of SEQ ID NO: 34, 36, 38, 40, 42, 44, 46, 48, and 50.

6. The isolated nucleic acid of claim 2 or 3, wherein the prokaryotic organism is a bacterium.

7. The isolated nucleic acid of claim 6, wherein the bacterium is a gram-positive bacterium.

8. The isolated nucleic acid of claim 6, wherein the bacterium is a gram-negative bacterium.

9. The isolated nucleic acid of claim 6, wherein the prokaryotic organism is an archaeabacterium.

10. An isolated nucleic acid, comprising a fragment of one of SEQ ID NO: 1, 3, 5, 7, 9, 11, 13, 15, 17, 19, 21, 23, 25, 27, 29, and 265-458, said fragment selected from the group consisting of fragments comprising at least 10, at least 20, at least 25, at least 30, at least 50 and at least 100 consecutive nucleotides of one of SEQ ID NO: 1, 3, 5, 7, 9, 11, 13, 15, 17, 19, 21, 23, 25, 27, 29, and 265-458, wherein said fragment encodes an amino substitution selected from the group consisting of I 59 N, A 70 V, A 71 V, L 91 Q, D 95 E, D 95 G, G 96 R, G 96 E, K 98 R, V 99 E, H 100 A, L 101 H, T 103 S, Y 110 F, E 114 V, L 127 R, D 157 N, R 158 C, P 159 L, A 160 V, D 178 V, H 188 Q, S 192 G, I 194 V, G 196 W, Q 200 H, and L 205 S, as compared to the amino acid sequence of SEQ ID NO: 32.

11. The isolated nucleic acid of claim 1, 2, or 3, further comprising a promoter operatively associated with the nucleotide sequence encoding the modified tetracycline repressor.

12. A vector comprising an isolated nucleic acid of claim 1, 2, or 3.

13. A prokaryotic organism comprising an isolated nucleic acid of claim 1, 2, or 3.

14. The prokaryotic organism of claim 13, wherein the prokaryotic organism is selected from the group consisting of Bacillus anthracis, Bacteriodes fragilis, Bordetella pertussis, Burkholderia cepacia, Camplyobacter jejuni, Chlamydia pneumoniae, Chlamydia trachomatus, Clostridium botulinum, Clostridum tetani, Clostridium perfringens, Clostridium difficile, Corynebacterium diptheriae, Enterobacter clocae, Enterococcus faecalis, Escherichia coli, Haemophilus influenzae, Helicobacter pylori, Klebsiella pneumoniae, Listeria monocytogenes, Moraxella catarrhalis, Mycobacterium leprae, Mycobacterium tuberculosis, Neisseria gonorrhoeae, Nesseria meningitidis, Nocardia asteroides, Proteus vulgaris, Pseudomonas aeruginosa, Salmonella typhi, Salmonella typhimurium, Shigella boydii, Shigella dysenteriae, Shigella flexneri, Shigella sonnei, Staphylococcus aureus, Staphylococcus epidermidis, Streptococcus mutans, Streptococcus pneumoniae, Treptonema pallidum, Vibrio cholerae, Vibrio parahemolyticus, and Yersina pestis.

15. A method for preparing a modified tetracycline repressor that binds to a tetracycline operator sequence in a prokaryotic organism with a greater affinity in the presence of tetracycline or a tetracycline analog than in the absence of tetracycline or a tetracycline analog, comprising:
introducing into a prokaryotic organism an expression vector comprising the nucleic acid of claim 1, 2, or 3 in operative association with a promoter; and
expressing the modified tetracycline repressor protein in the prokaryotic organism.

16. An isolated modified tetracycline repressor protein comprising an amino acid sequence selected from the group consisting of SEQ ID NO: 2, 4, 6, 8, 10, 12, 14, 16, 18, 20, 22, 24, 26, 28, 30, and 71-264.

17. An isolated modified tetracycline repressor protein comprising an amino acid sequence encoded by the isolated nucleic acid of claim 1, 2, or 3.

18. A method for identifying a modified tetracycline repressor that binds to a tetracycline operator sequence in a prokaryotic organism with a greater affinity in the presence of tetracycline or a tetracycline analog than in the absence of tetracycline or a tetracycline analog, comprising:
introducing into the prokaryotic organism a nucleic acid that comprises a reporter gene operatively linked to a promoter regulated by a tetracycline operator, and an expressible nucleic acid encoding a modified tetracycline repressor containing at least one amino acid substitution relative to a wild type tetracycline repressor, wherein the wild type tetracycline repressor binds the tetracycline operator with a greater affinity in the absence of tetracycline or the tetracycline analog than in the presence of tetracycline or the tetracycline analog;
culturing the prokaryotic organism in the presence or absence of tetracycline or the tetracycline analog, and under conditions such that the modified tetracycline repressor is expressed; and
identifying the prokaryotic organism that expresses the reporter gene at a higher level in the absence than in the presence of the tetracycline or the tetracycline analog.

19. The method of claim 18, wherein the nucleotide sequence encoding the modified tetracycline repressor hybridizes under stringent conditions to a nucleic acid probe consisting of the nucleotide sequence of SEQ ID NO: 31.

20. A method for identifying a gene essential for proliferation or pathogenicity of a prokaryotic organism, comprising:
culturing a prokaryotic organism, comprising a first expressible nucleic acid encoding a putative essential gene under the control of at least one tet operator and a second expressible nucleic acid encoding a modified tetracycline repressor that binds to a tetracycline operator sequence in a prokaryotic organism with a greater affinity in the presence of tetracycline or a tetracycline analog than in the absence of tetracycline or the tetracycline analog, under conditions such that the modified tetracycline repressor is expressed and in the presence of a sub-inhibitory concentration of tetracycline or a tetracycline analog sufficient to repress expression of the putative essential gene; and
determining the viability or pathogenicity of the organism, whereby an decrease in or lack of proliferation or pathogenicity in the presence of tetracycline or the tetracycline analog indicates that the gene is essential.

21. The method of claim 20, wherein the second expressible nucleic acid comprises the nucleic acid of claim 1, 2, or 3.

22. A method for identifying a compound that inhibits an essential gene or gene product of a prokaryotic organism, comprising:
culturing a prokaryotic organism, comprising a first expressible nucleic acid encoding the essential gene under the control of at least one tet operator and a second expressible nucleic acid encoding a modified tetracycline repressor that binds to a tetracycline operator sequence in a prokaryotic organism with a greater affinity in the presence of tetracycline or a tetracycline analog than in the absence of tetracycline or a tetracycline analog, under conditions such that the modified tetracycline repressor is expressed and in the presence of a sub-inhibitory concentration of tetracycline or a tetracycline analog sufficient to repress expression of the essential gene;
contacting the prokaryotic organism with a test compound; and
determining the effect of the test compound compared to control cells not cultured in tetracycline or tetracycline analog.

23. A method for identifying a compound that inhibits an essential gene
or gene product of a prokaryotic organism, comprising:
culturing a prokaryotic organism, comprising a first expressible nucleic acid encoding the essential gene under the control of at least one tet operator and a second expressible nucleic acid encoding a modified tetracycline repressor that binds to a tetracycline operator sequence in a prokaryotic organism with a greater affinity in the presence of tetracycline or a tetracycline analog than in the absence of tetracycline or a tetracycline analog, under conditions such that the modified tetracycline repressor is expressed and in the presence of a sub-inhibitory concentration of tetracycline or a tetracycline analog sufficient to repress expression of the essential gene;
contacting the prokaryotic organism with a test compound; and
determining the effect of the test compound compared to control cells cultured under the same conditions, wherein the control cells comprise said second expressible nucleic acid.

24. The method of claim 22, wherein the second expressible nucleic acid comprises the nucleic acid of claim 1, 2, or 3.

25. A method for identifying a compound that modulates the binding affinity of a modified tetracycline repressor to a tetracycline operator sequence in a prokaryotic organism, wherein the modified tetracycline repressor binds the tetracycline operator with a greater affinity in the presence of tetracycline or a tetracycline analog than in the absence of tetracycline or a tetracycline analog, comprising:
culturing a prokaryotic organism, comprising a nucleic acid comprising a reporter gene operatively linked to a promoter regulated by a tetracycline operator and said organism further comprising an expression vector comprising a nucleotide sequence encoding the modified tetracycline repressor, in the presence or absence of the compound under conditions such that the modified tetracycline repressor is expressed; and
identifying the compound that modulates expression of the reporter gene product.

26. The method of claim 25, wherein the modified tetracycline repressor is encoded by a nucleic acid of claim 1, 2, or 3.

27. A method for identifying a compound that inhibits an essential gene product of a prokaryotic organism, comprising:
infecting a first and a second animal with a prokaryotic organism comprising a nucleic acid comprising a nucleotide sequence encoding the essential gene under the control of at least one tet operator, said organism further comprising an expressible nucleic acid encoding a modified tetracycline repressor that binds to a tetracycline operator sequence in a prokaryotic organism with a greater affinity in the presence of tetracycline or a tetracycline analog than in the absence of tetracycline or a tetracycline analog, said first animal being provided with tetracycline or a tetracycline analog at a concentration sufficient to substantially repress expression of the essential gene in the prokaryotic organism;
contacting said first and second animals with a test compound; and
determining the effect of the test compound on said first and said second animals.

28. The method of claim 27, wherein the prokaryotic organism is selected from the group consisting of Bacillus anthracis, Bacteriodes fragilis, Bordetella pertussis, Burkholderia cepacia, Camplyobacter jejuni, Chlamydia pneumoniae, Chlamydia trachomatus, Clostridium botulinum, Clostridum tetani, Clostridium perfringens, Clostridium difficile, Corynebacterium diptheriae, Enterobacter clocae, Enterococcus faecalis, Escherichia coli, Haemophilus influenzae, Helicobacter pylori, Klebsiella pneumoniae, Listeria monocytogenes, Moraxella catarrhalis, Mycobacterium leprae, Mycobacterium tuberculosis, Neisseria gonorrhoeae, Nesseria meningitidis, Nocardia asteroides, Proteus vulgaris, Pseudomonas aeruginosa, Salmonella typhi, Salmonella typhimurium, Shigella boydii, Shigella dysenteriae, Shigella flexneri, Shigella sonnet, Staphylococcus aureus, Staphylococcus epidermidis, Streptococcus mutans, Streptococcus pneumoniae, Treptonema pallidum, Vibrio cholerae, Vibrio parahemolyticus, and Yersina pestis.

29. A method for correlating an expressed protein detected in proteomics analyses with a gene encoding the expressed protein, the method comprising the steps of:
(a) developing a first protein expression profile for a control prokaryotic organism, wherein the control organism comprises a target gene;
(b) providing a derivative of the control prokaryotic organism wherein said derivative comprises an expressible nucleic acid encoding a revTetR according to claim 1, 2, or 3, and wherein the target gene is operably associated with a tetracyline operator;
(c) developing a second protein expression profile for said derivative, wherein said derivative is grown is cultured in the presence of a subinhibitory level of tetracycline or a tetracycline analog, wherein said target gene is substantially underexpressed as compared to the expression of said target gene in the control strain; and
(d) comparing the first protein expression profile with the second protein expression profile to identify a protein expressed at a lower level in the second profile as compared to the level thereof in first profile.

30. An antibody that binds to a modified tetracycline repressor polypeptide of claim 16 or 17, wherein said antibody binds to said modified tetracycline repressor with an affinity greater than that with which said antibody binds to a wild-type tetracycline repressor polypeptide, wherein said wild-type tetracycline repressor polypeptide binds to a tetracycline operator sequence in a prokaryotic organism with a greater affinity in the absence of tetracycline or a tetracycline analogue than in the presence of tetracycline or the tetracycline analogue.

31. A method for producing a molecule selected from the group of proteins and nucleic acids, said method comprising:
a) providing a prokaryotic organism comprising a first expressible nucleic acid encoding a modified tetracycline repressor polypeptide of claim 16 or 17, and a second expressible nucleic acid encoding said molecule, wherein said second expressible nucleic acid is operably associated with a promoter and a tetracycline operator;
b) culturing said prokaryotic organism in a first growth medium comprising a first level of tetracycline or tetracycline analog for a first period of time sufficient to provide a plurality of said prokaryotic organisms; and
c) culturing said prokaryotic organism in a second growth medium comprising a second level of tetracycline or a tetracycline analog for a second period of time, wherein said second level of tetracycline or tetracycline analog is lower than said first level of tetracycline or tetracycline analog.

32. A method for modulating the level of synthesis of a target gene product in a prokaryotic cells, said method comprising:
a) providing a prokaryotic cell comprising a first expressible nucleic acid encoding a modified tetracycline repressor polypeptide according to claim 16 or 17, and a second expressible nucleic acid encoding an anti-RNA molecule, wherein said anti-RNA molecule inhibits synthesis of said target gene product, wherein said second expressible nucleic acid is operably associated with a promoter and a tetracycline operator; and
b) culturing said prokaryotic organism in a growth medium comprising a sub-inhibitory concentration tetracycline or a tetracycline analog for a period of time sufficient to provide a plurality of said prokaryotic organisms, whereby said level of synthesis is proportional to said concentration of tetracycline or tetracycline analog.

33. The isolated nucleic acid of claim 1, 2, or 3, wherein the encoded modified tetracycline repressor binds to a tetracycline operator sequence in a prokaryotic organism with a greater affinity in the presence of tetracycline or a tetracycline analog than in the absence of tetracycline or the tetracycline analog with a greater affinity at 28° C. than at 37° C.

34. The isolated nucleic acid of claim 1, 2, or 3, wherein the encoded modified tetracycline repressor binds to a tetracycline operator sequence in a prokaryotic organism with a greater affinity in the presence of tetracycline or a tetracycline analog than in the absence of tetracycline or the tetracycline analog with a greater affinity at 37° C. than at 28° C.

35. The method of claim 23, wherein the second expressible nucleic acid comprises the nucleic acid of claim 1, 2, or 3.

The application's sequence listing, which the Patent Office published only in electronic form, follows.

SEQUENCE LISTING (459 sequences)

SEQ ID NO: 1 - DNA, 624 bp, revTetR14
  CDS (1)...(624)
atgtctagattagataaaagtaaagtgattaacagcgcattagagctgcttaatgaggtcggaatcgaaggtttaacaacccgtaaactcgcccagaagcttggtgtagagcagcctacattgtattggcatgtaaaaaataagcgggccctactggatgcgctggcggtggagatcttggcgcgtcatcatgattattcactgcctgcggcgggggaatcctggcagtcatttctgcgcaataatgcaatgagtttccgccgcgcgctgctgcgttaccgtgacagggcaaaagtgcacctcggctcgcgtcctgatgaaaaacagtatgatacggtggtaacccagttacgctttatgacagaaaacggcttttcactgcgcgacgggttatatgcgatttcagcggtcagtcattttaccttaggtgccgtactggagcagcaggagcatactgccgccctgaccgaccgccctgcagcaccggacgaaaacctgccgccgctattgcgggaagcgctgcagattatggacagtgatgatggtgagcaggcctttctgcatggcctggagagcctgatccgggggtttgaggtgcagcttacggcactgttgcaaatagtc

SEQ ID NO: 2 - protein, 208 aa, revTetR14
MSRLDKSKVINSALELLNEVGIEGLTTRKLAQKLGVEQPTLYWHVKNKRALLDALAVEILARHHDYSLPAAGESWQSFLRNNAMSFRRALLRYRDRAKVHLGSRPDEKQYDTVVTQLRFMTENGFSLRDGLYAISAVSHFTLGAVLEQQEHTAALTDRPAAPDENLPPLLREALQIMDSDDGEQAFLHGLESLIRGFEVQLTALLQIV

SEQ ID NO: 3 - DNA, 624 bp, revTetR17b
  CDS (1)...(624)
atgtctagattagataaaagtaaagtgattaacagcgcattagagctgcttaatgaggtcggaatcgaaggtttaacaacccgtaaactcgcccagaagcttggtgtagagcagcctacattgtattggcatgtaaaaaataagcgggccctactggatgcgctggcggtggagatcttggcgcgtcatcatgattattcactgcctgcggcgggggaatcctggcagtcatttctgcgcaataatgcaatgagtttccgccgcgcgctgctgcgttaccgtgacgaggcaaaagtgcacctcggcacgcgtcctgatgaaaaacagtatgatacggtggaaacccagttacgctttatgacagaaaacggcttttcactgcgcgacgggttatatgcgatttcagcggtcagtcattttaccttaggtgccgtactggagcagcaggagcatactgccgccctgaccaaccgccctgcagcaccggacgaaaacctgccgccgctattgcgggaagcgctgcagattatggacagtgatgatggtgagcaggcctttctgcatggcctggagagcctgatccgggggtttgaggtgcatcttacggcactgttgcaaatagtc

SEQ ID NO: 4 - protein, 208 aa, revTetR17b
MSRLDKSKVINSALELLNEVGIEGLTTRKLAQKLGVEQPTLYWHVKNKRALLDALAVEILARHHDYSLPAAGESWQSFLRNNAMSFRRALLRYRDEAKVHLGTRPDEKQYDTVETQLRFMTENGFSLRDGLYAISAVSHFTLGAVLEQQEHTAALTNRPAAPDENLPPLLREALQIMDSDDGEQAFLHGLESLIRGFEVHLTALLQIV

SEQ ID NO: 5 - DNA, 624 bp, revTetR5a
  CDS (1)...(624)
atgtctagattagataaaagtaaagtgattaacagcgcattagagctgcttaatgaggtcggaatcgaaggtttaacaacccgtaaactcgcccagaagcttggtgtagagcagcctacattgtattggcatgtaaaaaataagcgggccctactggatgcgctggcggtggagatcttggcgcgtcatcatgattattcactgcctgcggcgggggaatcctggcagtcatttctgcgcaataatgcaatgagtttccgtcgcgcgctgctgcgttaccgtgacagggcaaaagtgcacctcggcacgcgtcctgatgaaaaacagtatgatacggtggaaacccagttacgctttatgacagaaaacggcttttcactgcgcgacgggttatatgcgatttcagcggtcagtcattttaccttaggtgccgtactggagcagcaggagcatactgccgccttgaccgaccgccctgcagcaccggacgaaaacctgccgccgctattgcgggaagcgctgcagattatggacagtgatgatggtgagcaggcctttctgcatggcctggagagcctgatccgggggtttgaggtgcagcttacggcactgttgcaaatagtc

SEQ ID NO: 6 - protein, 208 aa, revTetR5a
MSRLDKSKVINSALELLNEVGIEGLTTRKLAQKLGVEQPTLYWHVKNKRALLDALAVEILARHHDYSLPAAGESWQSFLRNNAMSFRRALLRYRDRAKVHLGTRPDEKQYDTVETQLRFMTENGFSLRDGLYAISAVSHFTLGAVLEQQEHTAALTDRPAAPDENLPPLLREALQIMDSDDGEQAFLHGLESLIRGFEVQLTALLQIV

SEQ ID NO: 7 - DNA, 624 bp, revTetR10
  CDS (1)...(624)
atgtctagattagataaaagtaaagtgattaacagcgcattagagctgcttaatgaggtcggaatcgaaggtttaacaacccgtaaactcgcccagaagcttggtgtagagcagcctacattgtattggcatgtaaaaaataagcgggccctactggatgcgctggcggtggagatcttggcgcgtcatcatgattattcactgcctgcggcgggggaatcctggcagtcatttctgcgcaataatgcaatgagtttccgccgcgcgctgctgcgttaccgtgacggggcaaaagtgcacctcggcacgcgtcctgatgaaaaacagtatgatacggtggaaacccagttacgctttatgacagaaaacggcttttcactgcgcgacgggttatatgcgatttcagcggtcagtcattttaccttaggtgccgtactggagcagcaggagcatactgccgccctgaccgaccgccctgtagcaccggacgaaaacctgccgccgctattgcgggaagcgctgcagattatggtcagtgatgatggtgagcaggcctttctgcatggcctggagagcctgatccggtggtttgaggtgcagcttacggcactgttgcaaatagtc

SEQ ID NO: 8 - protein, 208 aa, revTetR10
MSRLDKSKVINSALELLNEVGIEGLTTRKLAQKLGVEQPTLYWHVKNKRALLDALAVEILARHHDYSLPAAGESWQSFLRNNAMSFRRALLRYRDGAKVHLGTRPDEKQYDTVETQLRFMTENGFSLRDGLYAISAVSHFTLGAVLEQQEHTAALTDRPVAPDENLPPLLREALQIMVSDDGEQAFLHGLESLIRWFEVQLTALLQIV

SEQ ID NO: 9 - DNA, 624 bp, revTetR17a
  CDS (1)...(624)
atgtctagattagataaaagtaaagtgattaacagcgcattagagctgcttaatgaggtcggaatcgaaggtttaacaacccgtaaactcgcccagaagcttggtgtagagcagcctacattgtattggcatgtaaaaaataagcgggccctactggatgcgctggcggtggagaacttggcgcgtcatcatgattattcactgcctgcggcgggggaatcctggcagtcatttctgcgcaataatgcaatgagtttccgccgcgcgctgctgcgttaccgtgaaggggcaaaagtcgctctcggcacgcgtcctgatgaaaaacagtatgatacggtggaaacccagttacgctttatgacagaaaacggcttttcactgcgcgacgggttatatgcgatttcagcggtcagtcattttaccttaggtgccgtactggagcagcaggagcatactgccgccctgaccgaccgccctgcagcaccggacgaaaacctgccgccgctattgcgggaagcgctgcagattatggacagtgatgatggtgagcaggcctttctgcatggcctggagagcctgatccgggggtttgaggtgcagcttacggcactgttgcaaatagtc

SEQ ID NO: 10 - protein, 208 aa, revTetR17a
MSRLDKSKVINSALELLNEVGIEGLTTRKLAQKLGVEQPTLYWHVKNKRALLDALAVENLARHHDYSLPAAGESWQSFLRNNAMSFRRALLRYREGAKVALGTRPDEKQYDTVETQLRFMTENGFSLRDGLYAISAVSHFTLGAVLEQQEHTAALTDRPAAPDENLPPLLREALQIMDSDDGEQAFLHGLESLIRGFEVQLTALLQIV

SEQ ID NO: 11 - DNA, 624 bp, revTetR7
  CDS (1)...(624)
atgtctagattagataaaagtaaagtgattaacagcgcattagagctgcttaatgaggtcggaatcgaaggtttaacaacccgtaaactcgcccagaagcttggtgtagagcagcctacattgtattggcatgtaaaaaataagcgggccctactggatgcgctggcggtggagatcttggcgcgtcatcatgattattcactgcctgcggcgggggaatcttggcagtcatttctgcgcaataatgcaatgagtttccgccgcgcgctgctgcgttaccgtgacagggcaaaagtgcacctcggcacgcgtcctgatgaaaaacagtatgatacggtggaaacccagttacgctttatgacagaaaacggcttttcactgcgcgacggattatatgcgatttcagcggtcagtcattttaccttaggtgccgtactggagcagcaggagcatactgccgccctgaccgaccgccctgcagcaccggacgaaaacctgccgccgctattgcgggaagcgctgcagattatggacagtgatgatggtgagcaggcctttctgcaaggcctggagagcctgatccgggggtttgaggtgcagcttacggcactgttgcaaatagtc

SEQ ID NO: 12 - protein, 208 aa, revTetR7
MSRLDKSKVINSALELLNEVGIEGLTTRKLAQKLGVEQPTLYWHVKNKRALLDALAVEILARHHDYSLPAAGESWQSFLRNNAMSFRRALLRYRDRAKVHLGTRPDEKQYDTVETQLRFMTENGFSLRDGLYAISAVSHFTLGAVLEQQEHTAALTDRPAAPDENLPPLLREALQIMDSDDGEQAFLQGLESLIRGFEVQLTALLQIV

SEQ ID NO: 13 - DNA, 624 bp, revTetR9a
  CDS (1)...(624)
atgtctagattagataaaagtaaagtgattaacagcgcattagagctgcttaatgaggtcggaatcgaaggtttaacaacccgtaaactcgcccagaagcttggtgtagagcagcctacattgtattggcatgtaaaaaataagcgggccctactggatgcgctggcggtggagatcttggcgcgtcatcatgattattcactgcctgcggcgggggaatcctggcagtcatttctgcgcaataatgcaatgagtttccgccgcgcgctgctgcgttaccgtgacgaggcaaaagtgcacctcggcacgcgtcctgatgaaaaacagtatgatacggtggaaacccagttacgctttatgacagaaaacggcttttcactgcgcgacgggttatatgcgatttcagcggtcagtcattttaccttaggtgccgtactggagcagcaggagcatactgccgccctgaccgaccgccctgcagcaccggacgaaaacctgccgccgctattgcgggaagcgctgcagattatggacagtgatgatggtgagcaggcctttctgcatggcctggagagcctgatccgggggtttgaggtgcagcttacggcactgtcgcaaatagtc

SEQ ID NO: 14 - protein, 208 aa, revTetR9a
MSRLDKSKVINSALELLNEVGIEGLTTRKLAQKLGVEQPTLYWHVKNKRALLDALAVEILARHHDYSLPAAGESWQSFLRNNAMSFRRALLRYRDEAKVHLGTRPDEKQYDTVETQLRFMTENGFSLRDGLYAISAVSHFTLGAVLEQQEHTAALTDRPAAPDENLPPLLREALQIMDSDDGEQAFLHGLESLIRGFEVQLTALSQIV

SEQ ID NO: 15 - DNA, 624 bp, revTetR9b
  CDS (1)...(624)
atgtctagattagataaaagtaaagtgattaacagcgcattagagctgcttaatgaggtcggaatcgaaggtttaacaacccgtaaactcgcccagaagcttggtgtagagcagcctacattgtattggcatgtaaaaaataagcgggccctactggatgcgctggcggtggagatcttggcgcgtcatcatgattattcactgcctgcggcgggggaatcctggcagtcatttctgcgcaataacgcaatgagtttccgccgcgcgctgctgcgttaccgtgacgaggcaaaagtgcacctcggcacgcgtcctgatgaaaaacagtttgatacggtggaaacccagttacgctttatgacagaaaacggcttttcactgcgcgacgggttatatgcgatttcagcggtcagtcattttaccttaggtgccgtactggagcagcaggagcatactgccgccctgaccgaccgccctgcagcaccggacgaaaacctgccgccgctattgcgggaagcgctgcagattatggacagtgatgatggtgagcaggcctttctgcatggcctggagagcctgatccgggggtttgaggtgcagcttacggcactgttgcaaatagtc

SEQ ID NO: 16 - protein, 208 aa, revTetR9b
MSRLDKSKVINSALELLNEVGIEGLTTRKLAQKLGVEQPTLYWHVKNKRALLDALAVEILARHHDYSLPAAGESWQSFLRNNAMSFRRALLRYRDEAKVHLGTRPDEKQFDTVETQLRFMTENGFSLRDGLYAISAVSHFTLGAVLEQQEHTAALTDRPAAPDENLPPLLREALQIMDSDDGEQAFLHGLESLIRGFEVQLTALLQIV

SEQ ID NO: 17 - DNA, 624 bp, revTetR15
  CDS (1)...(624)
atgtctagattagataaaagtaaagtgattaacagcgcattagagctgcttaatgaggtcggaatcgaaggtttaacaacccgtaaactcgcccagaagcttggtgtagagcagcctacattgtattggcatgtaaaaaataagcgggccctactggatgcgctggcggtggagatcttggcgcgtcatcatgattattcactgcctgcggcgggggaatcctggcagtcatttctgcgcaataatgcaatgagtttccgccgcgcgctgctgcgttaccgtgacggggcaaaagagcacctcggcacgcgtcctgatgaaaaacagtatgatacggtggaaacccagttacgctttatgacagaaaacggcttttcactgcgcgacgggttatatgcgatttcagcggtcagtcattttaccttaggtgccgtactggagcagcaggagcatactgccgccctgaccgaccgccctgcagcaccggacgaaaacctgccgccgctattgcgggaagcgctgcagattatggacagtgatgatggtgagcaggcctttctgcatggcctggagagcctggtccgggggtttgaggtgcagcttacggcactgttgcaaatagtc

SEQ ID NO: 18 - protein, 208 aa, revTetR15
MSRLDKSKVINSALELLNEVGIEGLTTRKLAQKLGVEQPTLYWHVKNKRALLDALAVEILARHHDYSLPAAGESWQSFLRNNAMSFRRALLRYRDGAKEHLGTRPDEKQYDTVETQLRFMTENGFSLRDGLYAISAVSHFTLGAVLEQQEHTAALTDRPAAPDENLPPLLREALQIMDSDDGEQAFLHGLESLVRGFEVQLTALLQIV

SEQ ID NO: 19 - DNA, 624 bp, revTetR20e
  CDS (1)...(624)
atgtctagattagataaaagtaaagtgattaacagcgcattagagctgcttaatgaggtcggaatcgaaggtttaacaacccgtaaactcgcccagaagcttggtgtagagcagcctacattgtattggcatgtaaaaaataagcgggccctactggatgcgctggcggtggagatcttggcgcgtcatcatgattattcactgcctgcggcgggggaatcctggcagtcatttctgcgcaataatgcaatgagtttccgccgcgcgctgctgcgttaccgtgacggggcaaaagagcacctcggcacgcgtcctgatgaaaaacagtatgatacggtggaaacccagttacgctttatgacagaaaacggcttttcactgcgcgacgggttatatgcgatttcagcggtcagtcattttaccttaggtgccgtactggagcagcaggagcatactgccgccctgaccgactgccctgcagcaccggacgaaaacctgccgccgctattgcgggaagcgctgcagattatggacagtgatgatggtgagcaggcctttctgcatggcctggagagcctgatccgggggtttgaggtgcagcttacggcactgttgcaaatagtc

SEQ ID NO: 20 - protein, 208 aa, revTetR20e
MSRLDKSKVINSALELLNEVGIEGLTTRKLAQKLGVEQPTLYWHVKNKRALLDALAVEILARHHDYSLPAAGESWQSFLRNNAMSFRRALLRYRDGAKEHLGTRPDEKQYDTVETQLRFMTENGFSLRDGLYAISAVSHFTLGAVLEQQEHTAALTDCPAAPDENLPPLLREALQIMDSDDGEQAFLHGLESLIRGFEVQLTALLQIV

SEQ ID NO: 21 - DNA, 624 bp, revTetR21g
  CDS (1)...(624)
atgtctagattagataaaagtaaagtgattaacagcgcattagagctgcttaatgaggtcggaatcgaaggtttaacaacccgtaaactcgcccagaagcttggtgtagagcagcctacattgtattggcatgtaaaaaataagcgggccctactggatgcgctggcggtggagatcttggcgcgtcatcatgattattcactgcctgtggcgggggaatcctggcagtcatttctgcgcaataatgcaatgagtttccgccgcgcgctgcagcgttaccgtgacggggcaaaagagcacctcggcacgcgtcctgatgaaaaacagtatgatacggtggaaacccagttacgctttatgacagaaaacggcttttcactgcgcgacgggttatatgcgatttcagcggtcagtcattttaccttaggtgccgtactggagcagcaggagcatactgccgccctgaccgaccgccctgcagcaccggacgaaaacctgccgccgctattgcgggaagcgctgcagattatggacagtgatgatggtgagcaggcctttctgcatggcctggagagcctgatccgggggtttgaggtgcagcttacggcactgttgcaaatagtc

SEQ ID NO: 22 - protein, 208 aa, revTetR21g
MSRLDKSKVINSALELLNEVGIEGLTTRKLAQKLGVEQPTLYWHVKNKRALLDALAVEILARHHDYSLPVAGESWQSFLRNNAMSFRRALQRYRDGAKEHLGTRPDEKQYDTVETQLRFMTENGFSLRDGLYAISAVSHFTLGAVLEQQEHTAALTDRPAAPDENLPPLLREALQIMDSDDGEQAFLHGLESLIRGFEVQLTALLQIV

SEQ ID NO: 23 - DNA, 624 bp, revTetR4b
  CDS (1)...(624)
atgtctagattagataaaagtaaagtgattaacagcgcattagagctgcttaatgaggtcggaatcgaaggtttaacaacccgtaaactcgcccagaagcttggtgtagagcagcctacattgtattggcatgtaaaaaataagcgggccctactggatgcgctggcggtggagatcttggcgcgtcatcatgattattcactgcctgcggcgggggaatcctggcagtcatttctgcgcaataatgcaatgagtttccgccgcgcgctgctgcgttaccgtgacagggcaaaagtgcacctcggcacgcgccctgatgaaaaacagtatgatacggtggaaacccagttacgctttatgacagaaaacggcttttcactgcgcgacgggttatatgcgatttcagcggtcagtcattttaccttaggtgccgtactggagcagcaggagcatactgccgccctgaccgaccgccctgcagcaccggacgaaaacctgccgccgctattgcgggaagcgctgcagattatggacagtgatgatggtgagcaggcctttctgcatggcctggagagcctgatccgggggtttgaggtgcagcttacggcactgttgcaaatagtc

SEQ ID NO: 24 - protein, 208 aa, revTetR4b; identical to SEQ ID NO: 6

SEQ ID NO: 25 - DNA, 624 bp, revTetR11
  CDS (1)...(624)
atgtctagattagataaaagtaaagtgattaacagcgcattagagctgcttaatgaggtcggaatcgaaggtttaacaacccgtaaactcgcccagaagcttggtgtagagcagcctacattgtattggcatgtaaaaaataagcgggccctactggatgcgctggcggtggagatcttggcgcgtcatcatgattattcactgcctgcggcgggggaatcctggcagtcatttctgcgcaataatgcaatgagtttccgccgcgcgctgctgcgttaccgtgacggggcaaaagagcacctcggcacgcgtcctgatgaaaaacagtatgatacggtggaaacccagttacgctttatgacagaaaacggcttttcactgcgcgacgggttatatgcaatttcagcggtcagtcattttaccttaggtgccgtactggagcagcaggagcatactgccgccctgaccgaccgccctgcagcaccggacgaaaacctgccgccgctattgcgggaagcgctgcagattatggacagtgatgatggtgagcaggcctttctgcatggcctggagagcctgatccgggggtttgaggtgcagcttacggcactgttgcaaatagtc

SEQ ID NO: 26 - protein, 208 aa, revTetR11
MSRLDKSKVINSALELLNEVGIEGLTTRKLAQKLGVEQPTLYWHVKNKRALLDALAVEILARHHDYSLPAAGESWQSFLRNNAMSFRRALLRYRDGAKEHLGTRPDEKQYDTVETQLRFMTENGFSLRDGLYAISAVSHFTLGAVLEQQEHTAALTDRPAAPDENLPPLLREALQIMDSDDGEQAFLHGLESLIRGFEVQLTALLQIV

SEQ ID NO: 27 - DNA, 624 bp, revTetR19
  CDS (1)...(624)
atgtctagattagataaaagtaaagtgattaacagcgcattagagctgcttaatgaggtcggaatcgaaggtttaacaacccgtaaactcgcccagaagcttggtgtagagcagcctacattgtattggcatgtaaaaaataagcgggccctactggatgcgctggcggtggagatcttggcgcgtcatcatgattattcactgcctgcggtgggggaatcctggcagtcatttctgcgcaataatgcaatgagtttccgccgcgcgctgctgcgttaccgtggcggggcaaaagtgcacctcggcacgcgtcccgatgaaaaacagtatgatacggtggaaacccagttacgctttatgacagaaaacggcttttcacggcgcgacggtttatatgcgatttcagcggtcagtcattttaccttaggtgccgtactggagcagcaggagcatactgccgccctgaccgaccgccctgcagcaccggacgaaaacctgccgccgctattgcgggaagcgctgcagattatggacagtgatgatggtgagcaggcctttctgcatggcctggagagcctgatccgggggtttgaggtgcagcttacggcactgttgcaaatagtc

SEQ ID NO: 28 - protein, 208 aa, revTetR19
MSRLDKSKVINSALELLNEVGIEGLTTRKLAQKLGVEQPTLYWHVKNKRALLDALAVEILARHHDYSLPAVGESWQSFLRNNAMSFRRALLRYRGGAKVHLGTRPDEKQYDTVETQLRFMTENGFSRRDGLYAISAVSHFTLGAVLEQQEHTAALTDRPAAPDENLPPLLREALQIMDSDDGEQAFLHGLESLIRGFEVQLTALLQIV

SEQ ID NO: 29 - DNA, 624 bp, revTetR105
  CDS (1)...(624)
atgtctagattagataaaagtaaagtgattaacagcgcattagagctgcttaatgaggtcggaatcgaaggtttaacaacccgtaaactcgcccagaagcttggtgtagagcagcctacattgtattggcatgtaaaaaataagcgggccctactggatgcgctggcggtggagaacttggcgcgccatcatgattattcactgcctgcggcgggggaatcctggcagtcatttctgcgcaataatgcaatgagtttccgccgcgcgctgctgcgttaccgtgacggggcaagagtgcaccacggcacgcgtcctgatgaaaaacagtatgatacggtggaaacccagttacgctttatgacagaaaacggcttttcactgcgcgacgggttatatgcgatttcagcggtcagtcattttaccttaggtgccgtactggagcagcaggagcatactgccgccctgaccgaccgccctgcagcaccggacgaaaacctgccgccgctattgcgggaagcgctgcagattatggacagtgatgatggtgagcaggcctttctgcatggcctggagggcctgatccgggggtttgaggtgcagcttacggcactgttgcaaatagtc

SEQ ID NO: 30 - protein, 208 aa, revTetR105
MSRLDKSKVINSALELLNEVGIEGLTTRKLAQKLGVEQPTLYWHVKNKRALLDALAVENLARHHDYSLPAAGESWQSFLRNNAMSFRRALLRYRDGARVHHGTRPDEKQYDTVETQLRFMTENGFSLRDGLYAISAVSHFTLGAVLEQQEHTAALTDRPAAPDENLPPLLREALQIMDSDDGEQAFLHGLEGLIRGFEVQLTALLQIV

SEQ ID NO: 31 - DNA, 624 bp, TetR(BD)
  CDS (1)...(624)
atgtctagattagataaaagtaaagtgattaacagcgcattagagctgcttaatgaggtcggaatcgaaggtttaacaacccgtaaactcgcccagaagcttggtgtagagcagcctacattgtattggcatgtaaaaaataagcgggccctactggatgcgctggcggtggagatcttggcgcgtcatcatgattattcactgcctgcggcgggggaatcctggcagtcatttctgcgcaataatgcaatgagtttccgccgcgcgctgctgcgttaccgtgacggggcaaaagtgcacctcggcacgcgtcctgatgaaaaacagtatgatacggtggaaacccagttacgctttatgacagaaaacggcttttcactgcgcgacgggttatatgcgatttcagcggtcagtcattttaccttaggtgccgtactggagcagcaggagcatactgccgccctgaccgaccgccctgcagcaccggacgaaaacctgccgccgctattgcgggaagcgctgcagattatggacagtgatgatggtgagcaggcctttctgcatggcctggagagcctgatccgggggtttgaggtgcagcttacggcactgttgcaaatagtc

SEQ ID NO: 32 - protein, 208 aa, TetR(BD)
MSRLDKSKVINSALELLNEVGIEGLTTRKLAQKLGVEQPTLYWHVKNKRALLDALAVEILARHHDYSLPAAGESWQSFLRNNAMSFRRALLRYRDGAKVHLGTRPDEKQYDTVETQLRFMTENGFSLRDGLYAISAVSHFTLGAVLEQQEHTAALTDRPAAPDENLPPLLREALQIMDSDDGEQAFLHGLESLIRGFEVQLTALLQIV

SEQ ID NO: 33 - DNA, 651 bp, Escherichia coli
atgacaaagttgcagccgaatacagtgatccgtgccgccctggacctgttgaacgaggtcggcgtagacggtctgacgacacgcaaactggcggaacggttgggggttcagcagccggcgctttactggcacttcaggaacaagcgggcgctgctcgacgcactggccgaagccatgctggcggagaatcatacgcattcggtgccgagagccgacgacgactggcgctcatttctgatcgggaatgcccgcagcttcaggcaggcgctgctcgcctaccgcgatggcgcgcgcatccatgccggcacgcgaccgggcgcaccgcagatggaaacggccgacgcgcagcttcgcttcctctgcgaggcgggtttttcggccggggacgccgtcaatgcgctgatgacaatcagctacttcactgttggggccgtgcttgaggagcaggccggcgacagcgatgccggcgagcgcggcggcaccgttgaacaggctccgctctcgccgctgttgcgggccgcgatagacgccttcgacgaagccggtccggacgcagcgttcgagcagggactcgcggtgattgtcgatggattggcgaaaaggaggctcgttgtcaggaacgttgaaggaccgagaaagggtgacgattga

SEQ ID NO: 34 - protein, 216 aa, Escherichia coli
MTKLQPNTVIRAALDLLNEVGVDGLTTRKLAERLGVQQPALYWHFRNKRALLDALAEAMLAENHTHSVPRADDDWRSFLIGNARSFRQALLAYRDGARIHAGTRPGAPQMETADAQLRFLCEAGFSAGDAVNALMTISYFTVGAVLEEQAGDSDAGERGGTVEQAPLSPLLRAAIDAFDEAGPDAAFEQGLAVIVDGLAKRRLVVRNVEGPRKGDD

SEQ ID NO: 35 - DNA, 1550 bp, Escherichia coli
gtcaacaaaaattaggaattaatgatgtctagattagataaaagtaaagtgattaacagcgcattagagctgcttaatgaggtcggaatcgaaggtttaacaacccgtaaactcgcccagaagctaggtgtagagcagcctacattgtattggcatgtaaaaaataagcgggctttgctcgacgccttagccattgagatgttagataggcaccatactcacttttgccctttagaaggggaaagctggcaagattttttacgtaataacgctaaaagttttagatgtgctttactaagtcatcgcgatggagcaaaagtacatttaggtacacggcctacagaaaaacagtatgaaactctcgaaaatcaattagcctttttatgccaacaaggtttttcactagagaatgcattatatgcactcagcgctgtggggcattttactttaggttgcgtattggaagatcaagagcatcaagtcgctaaagaagaaagggaaacacctactactgatagtatgccgccattattacgacaagctatcgaattatttgatcaccaaggtgcagagccagccttcttattcggccttgaattgatcatatgcggattagaaaaacaacttaaatgtgaaagtgggtcttaaaagcagcataacctttttccgtgatggtaacttcacggtaaccaagatgtcgagttaaccaccctttagattcataaagcgaaaataatgcggctccaacgtacccacctaaatggaaacggcgttcactccaatctaaacacgcacaacagattttacgtgaatgtttggaaggaacgtcaattcccatttcatgaaaatattgaataccacttaatgtgatcattgaaccattttcagtgatccattgctgttgacaaagggaatcatagatcttaacggcaacttcgccagctaaatgatcatatagcaagtacgtgcttttcgtaaatgcactggcgtggaaactttggcatgtacgccatggtttaaggagatccccatcatactttccatcaattcagcaatatcttttcctgctagccgaaaataacgatgcttgccttgagctactactgtgattagctggcaatctaataatttagataaatgactgctcgccgttgaagctgatatattcgccacagaacttagctcagtggccgtccaagctcgcccatccatcaaagcactgagtattttaactcgtgaaatgtcagacatgagccccctatcgcggctattgaggactcaaaggtaacctcttttcgtattaaattagccatcgcaagttcactttattgcccaagggagcgtaacagatgcagccatactatcattgtccgttattaatatcagttggttagcatggtcactgtattgcactaaaatattaatgttattctccgccaatactcgtgctatttcgccaagttcccccggtttttcctgttttaacttacgaattaatggtgtccggatcgcaagtactaacagtccagcttgctctagcgctattttag

SEQ ID NO: 36 - protein, 207 aa, Escherichia coli
MSRLDKSKVINSALELLNEVGIEGLTTRKLAQKLGVEQPTLYWHVKNKRALLDALAIEMLDRHHTHFCPLEGESWQDFLRNNAKSFRCALLSHRDGAKVHLGTRPTEKQYETLENQLAFLCQQGFSLENALYALSAVGHFTLGCVLEDQEHQVAKEERETPTTDSMPPLLRQAIELFDHQGAEPAFLFGLELIICGLEKQLKCESGS

SEQ ID NO: 37 - DNA, 1110 bp, Plasmid pSC101
aagcttatcgatgataagctgtcaaacatgagaattcgcgaatgaacaagctccaacgcgaggccgtgatccgaaccgcgctcgaactgcttaacgacgtgggcatggaaggtctaacgacgcgccgactggctgagcgcctcggggtgcaacagccagcgctctactggcatttcaagaacaagcgtgcgttgctcgacgcacttgccgaagccatgctgacgataaatcacacgcattcgacgccaagggatgacgacgactggcgttcgttcctgaagggcaatgcatgcagttttcgacgggcgttgctcgcttatcgcgatggcgcgcgtattcatgccgggacgcggccagccgcgccgcagatggaaaaagccgacgcgcagcttcgcttcctttgcgatgctggcttttcggcaggtgacgcgacctatgcgttgatggcaatcagctacttcaccgtcggcgctgttcttgagcagcaagctagcgaggcagacgccgaggagcggggcgaagatcagttgaccacctcagcgtctacgatgccggcgcgcctacagagcgcgatgaaaatcgtctacgaaggcggtccggacgcggcattcgagcgaggcctggctctcatcatcggcggtcttgaaaaaatgaggctcactacgaacgacattgaggtgctgaagaatgttgacgaatgacagggggcggcaggtgcggagggcgcggttgcttcgtcatatgaagcaaagtcacctagctgaattaatgggtgtggatcaggcaaccgtgtcgcgctgggagcggggcacccttgcattgtcggatgggaggtggtcagcggttcttcaattgcttaccgggccttccgattcatcgtacgacgctgcgctgaagcgtctggtgcaatcctccgcccacaaagtccatctggtagcgaccggacacattgtttgctcgcggcatctccggccaggcaaagggaattgcggattgacctagccgaactccttggtaaatcgctgcgtgtttatgcgtccccgagatagttgcggccgactctgcgcttaatgggctcggttggcatgaggggcggctggggtcactcga

SEQ ID NO: 38 - protein, 219 aa, Plasmid pSC101
MNKLQREAVIRTALELLNDVGMEGLTTRRLAERLGVQQPALYWHFKNKRALLDALAEAMLTINHTHSTPRDDDDWRSFLKGNACSFRRALLAYRDGARIHAGTRPAAPQMEKADAQLRFLCDAGFSAGDATYALMAISYFTVGAVLEQQASEADAEERGEDQLTTSASTMPARLQSAMKIVYEGGPDAAFERGLALIIGGLEKMRLTTNDIEVLKNVDE

SEQ ID NO: 39 - DNA, 657 bp, Salmonella
atggcacggctgaacagagaatcggttattgatgcggcactggaactgctgaatgagacagggattgacgggctgacgacccgcaagctggcgcagaagctgggaatagaacagccgacactttactggcatgtgaaaaataaacgggcgttactggatgcgctggcggtggagatcctggcgcgtcatcatgattattcactgcctgcggcgggggaatcctggcagtcatttctgcgcaataatgcaatgagtttccgccgggcgctgctgcgttaccgtgacggggcaaaagtgcacctcggcacccgccctgatgaaaaacagtatgatacggtggaaacccagttacgctttatgacagaaaacggcttttcactgcgcgacgggttatatgcgatttcagcggtcagtcattttacccttggtgccgtactggagcagcaggagcatactgccgccctgaccgaccgccctgcagcaccggacgaaaacctgccgccgctattgcgggaagcgctgcagattatggacagtgatgatggtgagcaggcctttctgcatggcctggagagcctgatccgggggtttgaggtgcagcttacggcactgttgcaaatagtcggtggtgataaacttatcatccccttttgctga

SEQ ID NO: 40 - protein, 218 aa, Salmonella
MARLNRESVIDAALELLNETGIDGLTTRKLAQKLGIEQPTLYWHVKNKRALLDALAVEILARHHDYSLPAAGESWQSFLRNNAMSFRRALLRYRDGAKVHLGTRPDEKQYDTVETQLRFMTENGFSLRDGLYAISAVSHFTLGAVLEQQEHTAALTDRPAAPDENLPPLLREALQIMDSDDGEQAFLHGLESLIRGFEVQLTALLQIVGGDKLIIPFC

SEQ ID NO: 41 - DNA, 830 bp, Transposon Tn10
agttaacgttctctatcgatgatagggtttgaaaaataactctatcagtgatagattgtcaacagcaagtatcaattgcaagagatagctactatcccaaactttttattgagatagtcactatctaacagttgtccaaaaggagatagtgatggcacgactaagcttggacgacgtaatttcaatggcgctcaccctgctggacagcgaagggctagagggcttgactacgcgtaagctggcgcagtccctaaaaattgagcaaccgactctgtattggcacctgcgcaacaagcagactcttatgaacatgctttcagaggcaatactggcgaagcatcacacccgttcagcaccgttaccgactgagagttggcagcagtttctccaggaaaatgctctgagtttccgtaaagcattactggtccatcgtgatggagcccgattgcatatagggacctctcctacgcccccccagtttgaacaagcagaggcgcaactacgctgtctatgcgatgcagggttttcggtcgaggaggctcttttcattctgcaatctatcagccattttacgttgggtgcagtattagaggagcaagcaacaaaccagatagaaaataatcatgtgatagacgctgcaccaccattattacaagaggcatttaatattcaggcgagaacctctgctgaaatggccttccatttcgggctgaaatcattaatatttggattttctgcacagttagatgaaaaaaagcatacacccattgaggatggtaataaatgatgctatctatgtgtcaactctaatttatagttatggatagtgt

SEQ ID NO: 42 - protein, 211 aa, Transposon Tn10
MARLSLDDVISMALTLLDSEGLEGLTTRKLAQSLKIEQPTLYWHLRNKQTLMNMLSEAILAKHHTRSAPLPTESWQQFLQENALSFRKALLVHRDGARLHIGTSPTPPQFEQAEAQLRCLCDAGFSVEEALFILQSISHFTLGAVLEEQATNQIENNHVIDAAPPLLQEAFNIQARTSAEMAFHFGLKSLIFGFSAQLDEKKHTPIEDGNK

SEQ ID NO: 43 - DNA, 890 bp, Listonella anguillarum
gctgcgcacctgaaactccagcgccgctcaatggagcgactttatcaacgataaggagatggacatataacttatcggtgataaattgtcaagcactggcgaaggaacgtgaatgaccaaactggacaagggcaccgtgatcgcggcgggcctagagctgttgaacgaggttggcatggacagcctgacgacgcggaagctcgctgaacgcctcaaggttcagcagcctgcgctttactggcatttccagaacaaacgagcgctgcttgatgcgctgcccgaggcgatgctgcgggaacgccatacccgctcgctacccgaagagaatgaggactggcgggtgttcctgaaagagaatgccctgagcttcagaacggcgttgctctcttatcgggacggcgcgcgtatccatgccggcactcgaccgacagaaccgaattttggcaccgccgagacgcaaatacgctttctctgcgcggagggcttttgtccgaagcgcgccgtttgggcgctccgggcggtcagtcactatgtggtcggttccgttctcgagcagcaggcatctgatgccgatgagagagttccggacaggccagatgtgtccgagcaagcaccgtcgtccttcctgcacgtactgtttcacgagttggaaacagacggcatggatgctgcgttcaacttcggactcgacagcctcatcgctggtttcgagcggctgcgtgctgcagtgctagcgacagattgagaggcttcttgccctttgccgccccaactgccacgacaccgatccgctttgcacgatgcccatgacctcacggccgagctggcggtgcgatgaccggccgccacgggacaaagggaaatgagcggtatcttgccagacaggatac

SEQ ID NO: 44 - protein, 210 aa, Listonella anguillarum
MTKLDKGTVIAAGLELLNEVGMDSLTTRKLAERLKVQQPALYWHFQNKRALLDALPEAMLRERHTRSLPEENEDWRVFLKENALSFRTALLSYRDGARIHAGTRPTEPNFGTAETQIRFLCAEGFCPKRAVWALRAVSHYVVGSVLEQQASDADERVPDRPDVSEQAPSSFLHVLFHELETDGMDAAFNFGLDSLIAGFERLRAAVLATD

SEQ ID NO: 45 - DNA, 624 bp, Pasteurella multocida
atggcaaagctagataaagaacaagttattgatgatgcgttgattttacttaatgaagttggtattgaaggattaacaacgcgtaacgtggcgcaaaaaataggtgtggaacaacccacattgtattggcatgtaaaaaataaacgcgctttgttagatgcattagcagaaactattttgcaaaagcaccatcatcatgttttgccattgccgaatgaaacatggcaggactttttgcgaaataacgcgaaaagcttccgccaagccttattaatgtatcgtgatggtggcaaaattcatgcgggaacacgcccctctgaaagtcaatttgagacatcagaacagcaactacagtttttgtgtgatgctgggtttagtctatctcaagccgtgtatgcattaagctctattgcgcattttacattaggctccgtactggaaactcaagagcatcaagaaagccaaaaagagcgtgaaaaagtagagacggatactgttgcctatccgccattattaacccaagccgttgcaattatggatagtgataatggtgatgctgcatttttgtttgtccttgatgtgatgatctctggacttgaaacagtattaaagagcgctaaataa

SEQ ID NO: 46 - protein, 206 aa, Pasteurella multocida
MAKLDKEQVIDDALILLNEVGIEGLTTRNVAQKIGVEQPTLYWVKNKRALLDALAETILQKHHHHVLPLPNETWQDFLRNNAKSFRQALLMYRDGGKIHAGTRPSESQFETSEQQLQFLCDAGFSLSQAVYALSSIAHFTLGSVLETQEHQESQKEREKVETDTVAYPPLLTQAVAIMDSDNGDAAFLFVLDVMISGLETVLKSAK

SEQ ID NO: 47 - DNA, 624 bp, Proteus mirabilis
atggcaaaattagataaagaacaggttattgataacgcattgattttattaaatgaagtcggtatggaagggttaacaacacgtaagttggcgcaaaaattaggggtagagcaaccgacactttattggcatgtaaagaataaacgtgcgttattagatgctttagctgagactattttacaaaagcatcatcatcatgttttgccattagcgaatgaaagttggcaggattttttgcgtaataacgcaaaaagttttcgtcaagcgctattaatgtatcgtgatggtggaaagatccatgcaggcacacgaccatcagccaatcaatttgagacatcagagcaacaattgcaatttttgtgcgatgctggctttacgttaacgcaagctgtttatgcattaagttccatcgcgcattttacacttggttcagtgcttgaaacccaagaacatcaagagagccaaaaagagcgagaaaaagtgccaaaaacagagataaattacccaccattattaacacaagctattgatattatggatagtgataatggtgaagctgcattcctttttgtgctcgatgtgatgatttcagggctagaaacagtgctaaataatcatcattga

SEQ ID NO: 48 - protein, 207 aa, Proteus mirabilis
MAKLDKEQVIDNALILLNEVGMEGLTTRKLAQKLGVEQPTLYWHVKNKRALLDALAETILQKHHHHVLPLANESWQDFLRNNAKSFRQALLMYRDGGKIHAGTRPSANQFETSEQQLQFLCDAGFTLTQAVYALSSIAHFTLGSVLETQEHQESQKEREKVPKTEINYPPLLTQAIDIMDSDNGEAAFLFVLDVMISGLETVLNNHH

SEQ ID NO: 49 - DNA, 600 bp, Corynebacterium glutamicum
atgactcaccaccggaagcgtctcgaccgcacgtccgtgttgctcggggcccggcaggtgctcgacgagactgggctcgatggcttcaccactcgcgcgctggcggctcacttacaggtacagcagcccggcctctactggcacttccgcacgaaggccgaactcctcgcagcgctggcgagcgacgtgcttgaccgagagcatcacgcttccttccccgagtccgacgagaaatgggacgcatttctcttgcgaaacgcaagaagtttccgccacgcactacacgcggtccgtgacggtgcgcgtctccacgctgagcaccaccgcagaccatccggcgacgacaccgacgaaggagctgaggcttccggtcagcaagtcgggcttctcgtgtctcagggattcgatgaacagacagccatcagcatgctcatcgcggtcagccgatacaccgtcggtgtcgtactggaggagcaaaccgcagaggtcggcaatgcgagcgttcctgaacgcgaccgggaattcgatttcggcctgacagcactgatcgacggattctctcactcccgcacagcgtcattgacctcgagcgaatcgtga

SEQ ID NO: 50 - protein, 199 aa, Corynebacterium glutamicum
MTHHRKRLDRTSVLLGARQVLDETGLDGFTTRALAAHLQVQQPGLYWHFRTKAELLAALASDVLDREHHASFPESDEKWDAFLLRNARSFRHALHAVRDGARLHAEHHRRPSGDDTDEGAEASGQQVGLLVSQGFDEQTAISMLIAVSRYTVGVVLEEQTAEVGNASVPERDREFDFGLTALIDGFSHSRTASLTSSES

SEQ ID NO: 51 - DNA, 38 bp, Escherichia coli
actttatcactgataaacaaacttatcagtgataaaga

SEQ ID NO: 52 - DNA, 38 bp, Escherichia coli
actctatcattgatagagttccctatcagtgatagaga

SEQ ID NO: 53 - DNA, 38 bp, Plasmid pSC101
agcttatcatcgataagctagtttatcacagttaaatt

SEQ ID NO: 54 - DNA, 39 bp, Salmonella
actctatcattgataagggaactctatcaatgataggga

SEQ ID NO: 55 - DNA, 38 bp, Transposon Tn10
aatctatcactgatagagtaccctatcatcgatagaga

SEQ ID NO: 56 - protein, 52 aa, Salmonella
GRPRAITKHEQEQISRLLEKGHPRQQLAIIFGIGVSTLYRYFPASSIKKRMN

SEQ ID NO: 57 - protein, 49 aa, Phage P1
GRRPKYQEETQQQMRRLLEKGIPRKQVAIIYDVAVSTLYKKFPASSFQS

SEQ ID NO: 58 - protein, 56 aa, Bacteriophage Mu
GRPPKLTKAEQEQAGRLLAQGIPRKQVALIYDVALSTLYKKHPAKRAHIENDDRIN

SEQ ID NO: 59 - protein, 47 aa, e14 prophage
GRRPKLTPEQQAQAGRLIAAGTPRQKVAIIYDVGVSTLYKRFPAGDK

SEQ ID NO: 60 - DNA, 26 bp, Salmonella
ttcttgaaaaccaaggtttttgataa

SEQ ID NO: 61 - DNA, 26 bp, Salmonella
ttttccttttggaaggtttttgataa

SEQ ID NO: 62 - DNA, 26 bp, Bacteriophage Mu
ttcctgtaaaccgaggttttggataa

SEQ ID NO: 63 - DNA, 26 bp, Bacteriophage Mu
ttcctgtaaaccgaggttttggataa

SEQ ID NO: 64 - DNA, 26 bp, Phage P1
ttctcttaaaccaaggtttaggattg

SEQ ID NO: 65 - DNA, 26 bp, Phage P1
ttctcttaaaccaaggtattggataa

SEQ ID NO: 66 - DNA, 26 bp, e14 prophage
ttctcccaaaccaaggttttcgagag

SEQ ID NO: 67 - DNA, 26 bp, e14 prophage
ttctcccaaaccaacgtttatgaaaa

SEQ ID NO: 68 - DNA, 648 bp, Agrobacterium tumefaciens
atggctatcggacgtgatcgcattgtcgatgaggccctgcggctcctgaacgaggtgggaatagacaagctgtccacccgcaagctcgcggaacggctgggcgtccagcagccggcgctctactggcacttccgcaacaaggcggaattgctcgacgccatcaattccgaaatgctgctgcgttatcactgcgatcgcctgcccaaacccggccaggattggattacgttcacgctggccaatgcccgcagcattcgcaagaccttgctcaccgtgcgcgatggcgcgcggctaaccgcaggtacacggccttccgtcgccgagtttgccgatgtggaaagcgtcttgcagctctatgtcgagacgggattttccgcagaggaggcatttgggatcgccatttgcatcacgcgctatgtggtcggctatgtgctcgaagaacagggagagcgcgaacgggatcggatggatcaacactcgcccaataccgacatcatggcagaactcgcacagttccccctgcttgcaaaagctcttgaaagcttccccacggttggaacggtcaacaccgaagccgtgttcgagagtgggctaagttacctgctggccggtatgaaggagaagctgcgggagaaacagtctagatag

SEQ ID NO: 69 - protein, 215 aa, Agrobacterium tumefaciens
MAIGRDRIVDEALRLLNEVGIDKLSTRKLAERLGVQQPALYWHFRNKAELLDAINSEMLLRYHCDRLPKPGQDWITFTLANARSIRKTLLTVRDGARLTAGTRPSVAEFADVESVLQLYVETGFSAEEAFGIAICITRYVVGYVLEEQGERERDRMDQHSPNTDIMAELAQFPLLAKALESFPTVGTVNTEAVFESGLSYLLAGMKEKLREKQSR

SEQ ID NO: 70 - protein, 208 aa, Artificial Sequence
  Combination of three TetR(G) sequences from GenBank accession No. AF133139, AF133140, S52438
MTKLDKGTVIAAALELLNEVGMDSLTTRKLAERLKVQQPALYWHFQNKRALLDALAEAMLAERHTRSLPEENEDWRVFLKENALSFRTALLSYRDGARIHAGTRPTEPNFGTAETQIRFLCAEGFCPKRAVWALRAVSHYVVGSVLEQQASDADERVPDRPDVSEQAPSSFLHDLFHELETDGMDAAFNFGLDSLIAGFERLRSSTTD

SEQ ID NO: 71 - protein, 208 aa, Artificial
  Modified tetracycline repressor
MSRLDKSKVINSALELLNEVGIEGLTTRKLAQKLGVEQPTLYWHVKNKRSLLFALGIEILARQHDYSLPAAGESWQSFLRNNAMSFRRALLRYRDGAKVHLGTRPDEKQYDTVETQLRFMTENGFSLRDGLYAISAVSHFTLGAVLEQQEHTAALTDRPAAPDENLPPLLREALQIMDSDDGEQAFLHGLESLIRGFEVQLTALLQIV

SEQ ID NO: 72 - protein, 208 aa, Artificial
  Modified tetracycline repressor
MSRLDKSKVINSALELLNEVGIEGLTTRKLAQKLGVEQPTLYWHVKNKRALLDALAVENFGRHHDYSLPAAGESWQSFLRNNAMSFRRALLRYRDGAKVHLGTRPDEKQYDTVETQLRFMTENGFSLRDGLYAISAVSHFTLGAVLEQQEHTAALTDRPAAPDENLPPLLREALQIMDSDDGEQAFLHGLESLIRGFEVQLTALLQIV

SEQ ID NO: 73 - protein, 208 aa, Artificial
  Modified tetracycline repressor
MSRLDKSKVINSALELLNEVGIEGLTTRKLAQKLGVEQPTLYWHVKNKRALLDALPVEILASHHDYSLPAAGESWQSFLRNNAMSFRRALLRYRDGAKVHLGTRPDEKQYDTVETQLRFMTENGFSLRDGLYAISAVSHFTLGAVLEQQEHTAALTDRPAAPDENLPPLLREALQIMDSDDGEQAFLHGLESLIRGFEVQLTALLQIV

SEQ ID NO: 74 - protein, 208 aa, Artificial
  Modified tetracycline repressor
MSRLDKSKVINSALELLNEVGIEGLTTRKLAQKLGVEQPTLYWHVKNKRALLDALAVNTFARYHDYSLPAAGESWQSFLRNNAMSFRRALLRYRDGAKVHLGTRPDEKQYDTVETQLRFMTENGFSLRDGLYAISAVSHFTLGAVLEQQEHTAALTDRPAAPDENLPPLLREALQIMDSDDGEQAFLHGLESLIRGFEVQLTALLQIV

SEQ ID NO: 75 - protein, 208 aa, Artificial
  Modified tetracycline repressor
MSRLDKSKVINSALELLNEVGIEGLTTRKLAQKLGVEQPTLYWHVKNKRALLQALAVKILVPDHDYSLPAAGESWQSFLRNNAMSFRRALLRYRDGAKVHLGTRPDEKQYDTVETQLRFMTENGFSLRDGLYAISAVSHFTLGAVLEQQEHTAALTDRPAAPDENLPPLLREALQIMDSDDGEQAFLHGLESLIRGFEVQLTALLQIV

SEQ ID NO: 76 - protein, 208 aa, Artificial
  Modified tetracycline repressor
MSRLDKSKVINSALELLNEVGIEGLTTRKLAQKLGVEQPTLYWHVKNKRALLNGLAFESFARHHDYSLPAAGESWQSFLRNNAMSFRRALLRYRDGAKVHLGTRPDEKQYDTVETQLRFMTENGFSLRDGLYAISAVSHFTLGAVLEQQEHTAALTDRPAAPDENLPPLLREALQIMDSDDGEQAFLHGLESLIRGFEVQLTALLQIV

SEQ ID NO: 77 - protein, 208 aa, Artificial
  Modified tetracycline repressor
MSRLDKSKVINSALELLNEVGIEGLTTRKLAQKLGVEQPTLYWHVKNKRALMDALPLVILARHHDYSLPAAGESWQSFLRNNAMSFRRALLRYRDGAKVHLGTRPDEKQYDTVETQLRFMTENGFSLRDGLYAISAVSHFTLGAVLEQQEHTAALTDRPAAPDENLPPLLREALQIMDSDDGEQAFLHGLESLIRGFEVQLTALLQIV

SEQ ID NO: 78 - protein, 208 aa, Artificial; identical to SEQ ID NO: 74
  Modified tetracycline repressor

SEQ ID NO: 79 - protein, 208 aa, Artificial
  Modified tetracycline repressor
MSRLDKSKVINSALELLNEVGIEGLTTRKLAQKLGVEQPTLYWHVKNKHALLDALPLEIMARQHDYSLPAAGESWQSFLRNNAMSFRRALLRYRDGAKVHLGTRPDEKQYDTVETQLRFMTENGFSLRDGLYAISAVSHFTLGAVLEQQEHTAALTDRPAAPDENLPPLLREALQIMDSDDGEQAFLHGLESLIRGFEVQLTALLQIV

SEQ ID NO: 80 - protein, 208 aa, Artificial
  Modified tetracycline repressor
MSRLDKSKVINSALELLNEVGIEGLTTRKLAQKLGVEQPTLYWHVKNKGALLDALAVNILALQHDYSLPAAGESWQSFLRNNAMSFRRALLRYRDGAKVHLGTRPDEKQYDTVETQLRFMTENGFSLRDGLYAISAVSHFTLGAVLEQQEHTAALTDRPAAPDENLPPLLREALQIMDSDDGEQAFLHGLESLIRGFEVQLTALLQIV

SEQ ID NO: 81 - protein, 208 aa, Artificial
  Modified tetracycline repressor
MSRLDKSKVINSALELLNEVGIEGLTTRKLAQKLGVEQPTLYWHVKNKRALLDALAVKIVTGHHDYSLPAAGESWQSFLRNNAMSFRRALLRYRDGAKVHLGTRPDEKQYDTVETQLRFMTENGFSLRDGLYAISAVSHFTLGAVLEQQEHTAALTDRPAAPDENLPPLLREALQIMDSDDGEQAFLHGLESLIRGFEVQLTALLQIV

SEQ ID NO: 82 - protein, 208 aa, Artificial
  Modified tetracycline repressor
MSRLDKSKVINSALELLNEVGIEGLTTRKLAQKLGVEQPTLYWHVKNKRALLFALALESLSRHHDYSLPAAGESWQSFLRNNAMSFRRALLRYRDGAKVHLGTRPDEKQYDTVETQLRFMTENGFSLRDGLYAISAVSHFTLGAVLEQQEHTAALTDRPAAPDENLPPLLREALQIMDSDDGEQAFLHGLESLIRGFEVQLTALLQIV

SEQ ID NO: 83 - protein, 208 aa, Artificial
  Modified tetracycline repressor
MSRLDKSKVINSALELLNEVGIEGLTTRKLAQKLGVEQPTLYWHVKNKHALLDALPLEIMARHHDYSLPAAGESWQSFLRNNAMSFRRALLRYRDGAKVHLGTRPDEKQYDTVETQLRFMTENGFSLRDGLYAISAVSHFTLGAVLEQQEHTAALTDRPAAPDENLPPLLREALQIMDSDDGEQAFLHGLESLIRGFEVQLTALLQIV

SEQ ID NO: 84 - protein, 208 aa, Artificial
  Modified tetracycline repressor
MSRLDKSKVINSALELLNEVGIEGLTTRKLAQKLGVEQPTLYWHVKNKRDVQDALAVEILSRHHDYSLPAAGESWQSFLRNNAMSFRRALLRYRDGAKVHLGTRPDEKQYDTVETQLRFMTENGFSLRDGLYAISAVSHFTLGAVLEQQEHTAALTDRPAAPDENLPPLLREALQIMDSDDGEQAFLHGLESLIRGFEVQLTALLQIV

SEQ ID NO: 85 - protein, 208 aa, Artificial
  Modified tetracycline repressor
MSRLDKSKVINSALELLNEVGIEGLTTRKLAQKLGVEQPTLYWHVKNKRALLDALPAQILARQHDYSLPAAGESWQSFLRNNAMSFRRALLRYRDGAKVHLGTRPDEKQYDTVETQLRFMTENGFSLRDGLYAISAVSHFTLGAVLEQQEHTAALTDRPAAPDENLPPLLREALQIMDSDDGEQAFLHGLESLIRGFEVQLTALLQIV

SEQ ID NO: 86 - protein, 208 aa, Artificial
  Modified tetracycline repressor
MSRLDKSKVINSALELLNEVGIEGLTTRKLAQKLGVEQPTLYWHVKNKRALLDALALVTFASHHDYSLPAAGESWQSFLRNNAMSFRRALLRYRDGAKVHLGTRPDEKQYDTVETQLRFMTENGFSLRDGLYAISAVSHFTLGAVLEQQEHTAALTDRPAAPDENLPPLLREALQIMDSDDGEQAFLHGLESLIRGFEVQLTALLQIV

SEQ ID NO: 87 - protein, 208 aa, Artificial
  Modified tetracycline repressor
MSRLDKSKVINSALELLNEVGIEGLTTRKLAQKLGVEQPTLYWHVKNKRALLDALAVKIVAGHHDYSLPAAGESWQSFLRNNAMSFRRALLRYRDGAKVHLGTRPDEKQYDTVETQLRFMTENGFSLRDGLYAISAVSHFTLGAVLEQQEHTAALTDRPAAPDENLPPLLREALQIMDSDDGEQAFLHGLESLIRGFEVQLTALLQIV

SEQ ID NO: 88 - protein, 208 aa, Artificial; identical to SEQ ID NO: 74
  Modified tetracycline repressor

SEQ ID NO: 89 - protein, 208 aa, Artificial
  Modified tetracycline repressor
MSRLDKSKVINSALELLNEVGIEGLTTRKLAQKLGVEQPTLYWHVKNKRALLESLAVEMLPRHHDYSLPAAGESWQSFLRNNAMSFRRALLRYRDGAKVHLGTRPDEKQYDTVETQLRFMTENGFSLRDGLYAISAVSHFTLGAVLEQQEHTAALTDRPAAPDENLPPLLREALQIMDSDDGEQAFLHGLESLIRGFEVQLTALLQIV

SEQ ID NO: 90 - protein, 208 aa, Artificial
  Modified tetracycline repressor
MSRLDKSKVINSALELLNEVGIEGLTTRKLAQKLGVEQPTLYWHVKNKRSLLYGLGIEILARQHDYSLPAAGESWQSFLRNNAMSFRRALLRYRDGAKVHLGTRPDEKQYDTVETQLRFMTENGFSLRDGLYAISAVSHFTLGAVLEQQEHTAALTDRPAAPDENLPPLLREALQIMDSDDGEQAFLHGLESLIRGFEVQLTALLQIV

SEQ ID NO: 91 - protein, 208 aa, Artificial
  Modified tetracycline repressor
MSRLDKSKVINSALELLNEVGIEGLTTRKLAQKLGVEQPTLYWHVKNKRALLESLAVEILPRHHDYSLPAAGESWQSFLRNNAMSFRRALLRYRDGAKVHLGTRPDEKQYDTVETQLRFMTENGFSLRDGLYAISAVSHFTLGAVLEQQEHTAALTDRPAAPDENLPPLLREALQIMDSDDGEQAFLHGLESLIRGFEVQLTALLQIV

SEQ ID NO: 92 - protein, 208 aa, Artificial
  Modified tetracycline repressor
MSRLDKSKVINSALELLNEVGIEGLTTRKLAQKLGVEQPTLYWHVKNKRALLDALAVESLASHHDYSLPAAGESWQSFLRNNAMSFRRALLRYRDGAKVHLGTRPDEKQYDTVETQLRFMTENGFSLRDGLYAISAVSHFTLGAVLEQQEHTAALTDRPAAPDENLPPLLREALQIMDSDDGEQAFLHGLESLIRGFEVQLTALLQIV

SEQ ID NO: 93 - protein, 208 aa, Artificial
  Modified tetracycline repressor
MSRLDKSKVINSALELLNEVGIEGLTTRKLAQKLGVEQPTLYWHVKNKRALLDALPVEILGRHHDYSLPAAGESWQSFLRNNAMSFRRALLRYRDGAKVHLGTRPDEKQYDTVETQLRFMTENGFSLRDGLYAISAVSHFTLGAVLEQQEHTAALTDRPAAPDENLPPLLREALQIMDSDDGEQAFLHGLESLIRGFEVQLTALLQIV

SEQ ID NO: 94 - protein, 208 aa, Artificial
  Modified tetracycline repressor
MSRLDKSKVINSALELLNEVGIEGLTTRKLAQKLGVEQPTLYWHVKNKRALVDALVLETLSRHHDYSLPAAGESWQSFLRNNAMSFRRALLRYRDGAKVHLGTRPDEKQYDTVETQLRFMTENGFSLRDGLYAISAVSHFTLGAVLEQQEHTAALTDRPAAPDENLPPLLREALQIMDSDDGEQAFLHGLESLIRGFEVQLTALLQIV

SEQ ID NO: 95 - protein, 208 aa, Artificial
  Modified tetracycline repressor
MSRLDKSKVINSALELLNEVGIEGLTTRKLAQKLGVEQPTLYWHVKNKRALLYAMCVEIFARNHDYSLPAAGESWQSFLRNNAMSFRRALLRYRDGAKVHLGTRPDEKQYDTVETQLRFMTENGFSLRDGLYAISAVSHFTLGAVLEQQEHTAALTDRPAAPDENLPPLLREALQIMDSDDGEQAFLHGLESLIRGFEVQLTALLQIV

SEQ ID NO: 96 - protein, 208 aa, Artificial
  Modified tetracycline repressor
MSRLDKSKVINSALELLNEVGIEGLTTRKLAQKLGVEQPTLYWHVKNKRALLDALAVANLERYNDYSLPAAGESWQSFLRNNAMSFRRALLRYRDGAKVHLGTRPDEKQYDTVETQLRFMTENGFSLRDGLYAISAVSHFTLGAVLEQQEHTAALTDRPAAPDENLPPLLREALQIMDSDDGEQAFLHGLESLIRGFEVQLTALLQIV

SEQ ID NO: 97 - protein, 208 aa, Artificial
  Modified tetracycline repressor
MSRLDKSKVINSALELLNEVGIEGLTTRKLAQKLGVEQPTLYWHVKNKRALLNSLPPEILALHHDYSLPAAGESWQSFLRNNAMSFRRALLRYRDGAKVHLGTRPDEKQYDTVETQLRFMTENGFSLRDGLYAISAVSHFTLGAVLEQQEHTAALTDRPAAPDENLPPLLREALQIMDSDDGEQAFLHGLESLIRGFEVQLTALLQIV

SEQ ID NO: 98 - protein, 208 aa, Artificial
  Modified tetracycline repressor
MSRLDKSKVINSALELLNEVGIEGLTTRKLAQKLGVEQPTLYWHVKNKRALLDALAVEFLSRHQDYSLPAAGESWQSFLRNNAMSFRRALLRYRDGTKVHLGTRPDEKQYDTVETQLRFMTENGFSLRDGLYAISAVSHFTLGAVLEQQEHTAALTDRPAAPDENLPPLLREALQIMDSDDGEQAFLHGLESLIRGFEVQLTALLQIV

SEQ ID NO: 99 - protein, 208 aa, Artificial
  Modified tetracycline repressor
MSRLDKSKVINSALELLNEVGIEGLTTRKLAQKLGVEQPTLYWHVKNKRALLFTMAVESLARQHDYSLPAAGESWQSFLRNNAMSFRRALLRYRDGAKVHLGTRPDEKQYDTVETQLRFMTENGFSLRDGLYAISAVSHFTLGAVLEQQEHTAALTDRPAAPDENLPPLLREALQIMDSDDGEQAFLHGLESLIRGFEVQLTALLQIV

SEQ ID NO: 100 - protein, 208 aa, Artificial
  Modified tetracycline repressor
MSRLDKSKVINSALELLNEVGIEGLTTRKLAQKLGVEQPTLYWHVKNKRALLFAMAVESLARQHDYSLPAAGESWQSFLRNNAMSFRRALLRYRDGAKVHLGTRPDEKQYDTVETQLRFMTENGFSLRDGLYAISAVSHFTLGAVLEQQEHTAALTDRPAAPDENLPPLLREALQIMDSDDGEQAFLHGLESLIRGFEVQLTALLQIV

SEQ ID NO: 101 - protein, 208 aa, Artificial; identical to SEQ ID NO: 95
  Modified tetracycline repressor

SEQ ID NO: 102 - protein, 208 aa, Artificial
  Modified tetracycline repressor
MSRLDKSKVINSALELLNEVGIEGLTTRKLAQKLGVEQPTLYWHVKNKRALLYALPVEILALHHDYSLPAAGESWQSFLRNNAMSFRRALLRYRDGAKVHLGTRPDEKQYDTVETQLRFMTENGFSLRDGLYAISAVSHFTLGAVLEQQEHTAALTDRPAAPDENLPPLLREALQIMDSDDGEQAFLHGLESLIRGFEVQLTALLQIV

SEQ ID NO: 103 - protein, 208 aa, Artificial
  Modified tetracycline repressor
MSRLDKSKVINSALELLNEVGIEGLTTRKLAQKLGVEQPTLYWHVKNKRALLDALVVEHLALHHDYSLPAAGESWQSFLRNNAMSFRRALLRYRDGAKVHLGTRPDEKQYDTVETQLRFMTENGFSLRDGLYAISAVSHFTLGAVLEQQEHTAALTDRPAAPDENLPPLLREALQIMDSDDGEQAFLHGLESLIRGFEVQLTALLQIV

SEQ ID NO: 104 - protein, 208 aa, Artificial
  Modified tetracycline repressor
MSRLDKSKVINSALELLNEVGIEGLTTRKLAQKLGVEQPTLYWHVKNKRALLYALGVGILARHHDYSLPAAGESWQSFLRNNAMSFRRALLRYRDGAKVHLGTRPDEKQYDTVETQLRFMTENGFSLRDGLYAISAVSHFTLGAVLEQQEHTAALTDRPAAPDENLPPLLREALQIMDSDDGEQAFLHGLESLIRGFEVQLTALLQIV

SEQ ID NO: 105 - protein, 208 aa, Artificial
  Modified tetracycline repressor
MSRLDKSKVINSALELLNEVGIEGLTTRKLAQKLGVEQPTLYWHVKNKRALLDALAVERLERHNDYSLPAAGESWQSFLRNNAMSFRRALLRYRDGAKVHLGTRPDEKQYDTVETQLRFMTENGFSLRDGLYAISAVSHFTLGAVLEQQEHTAALTDRPAAPDENLPPLLREALQIMDSDDGEQAFLHGLESLIRGFEVQLTALLQIV

SEQ ID NO: 106 - protein, 208 aa, Artificial
  Modified tetracycline repressor
MSRLDKSKVINSALELLNEVGIEGLTTRKLAQKLGVEQPTLYWHVKNKRALLAALAVEILPRHHDYSLPAAGESWQSFLRNNAMSFRRALLRYRDGAKVHLGTRPDEKQYDTVETQLRFMTENGFSLRDGLYAISAVSHFTLGAVLEQQEHTAALTDRPAAPDENLPPLLREALQIMDSDDGEQAFLHGLESLIRGFEVQLTALLQIV

SEQ ID NO: 107 - protein, 208 aa, Artificial
  Modified tetracycline repressor
MSRLDKSKVINSALELLNEVGIEGLTTRKLAQKLGVEQPTLYWHVKNKRALLTAMPVEILSRHHDYSLPAAGESWQSFLRNNAMSFRRALLRYRDGAKVHLGTRPDEKQYDTVETQLRFMTENGFSLRDGLYAISAVSHFTLGAVLEQQEHTAALTDRPAAPDENLPPLLREALQIMDSDDGEQAFLHGLESLIRGFEVQLTALLQIV

SEQ ID NO: 108 - protein, 208 aa, Artificial; identical to SEQ ID NO: 74
  Modified tetracycline repressor

SEQ ID NO: 109 - protein, 208 aa, Artificial
  Modified tetracycline repressor
MSRLDKSKVINSALELLNEVGIEGLTTRKLAQKLGVEQPTLYWHVKNKRALMDAMPLVILARHHDYSLPAAGESWQSFLRNNAMSFRRALLRYRDGAKVHLGTRPDEKQYDTVETQLRFMTENGFSLRDGLYAISAVSHFTLGAVLEQQEHTAALTDRPAAPDENLPPLLREALQIMDSDDGEQAFLYGLESLIRGFEVQLTALLQIV

SEQ ID NO: 110 - protein, 208 aa, Artificial
  Modified tetracycline repressor
MSRLDKSKVINSALELLNEVGIEGLTTRKLAQKLGVEQPTLYWHVKNKRALLDALPLVILARHHDYSLPAAGESWQSFLRNNAMSFRRALLRYRDGAKVHLGTRPDEKQYDTVETQLRFMTENGFSLRDGLYAISAVSHFTLGAVLEQQEHTAALTDRPAAPDENLPPLLREALQIMDSDDGEQAFLHGLESLIRGFEVQLTALLQIV

SEQ ID NO: 111 - protein, 208 aa, Artificial; identical to SEQ ID NO: 91
  Modified tetracycline repressor

SEQ ID NO: 112 - protein, 208 aa, Artificial; identical to SEQ ID NO: 89
  Modified tetracycline repressor

SEQ ID NO: 113 - protein, 208 aa, Artificial
  Modified tetracycline repressor
MSRLDKSKVINSALELLNEVGIEGLTTRKLAQKLGVEQPTLYWHVKNKRALLDALAVEILARHHDYSLPAAGESWQSFLRNNAMSFRRALLRYRDEATVHLGTRPDEKQYDTVETQLRFMTENGFSLRDGLYAISAVSHFTLGAVLEQQEHTAALTDRPAAPDENLPPLLREALQIMDSDDGEQAFLHGLESLIRGFEVQLTALLQIV

SEQ ID NO: 114 - protein, 208 aa, Artificial
  Modified tetracycline repressor
MSRLDKSKVINSALELLNEVGIEGLTTRKLAQKLGVEQPTLYWHVKNKRALLDALAVEILARHHDYSLPAAGESWQSFLRNNAMSFRRALLRYRDEAKVHLGTRPDEKQYDTAETQLRFMTENGFSLRDGLYAISAVSHFTLGAVLEQQEHTAALTDRPAAPDENLPPLLREALQIMDSDDGEQAFLHGLESLIRGFEVQLTALLQIV

SEQ ID NO: 115 - protein, 208 aa, Artificial
  Modified tetracycline repressor
MSRLDKSKVINSALELLNEVGIEGLTTRKLAQKLGVEQPTLYWHVKNKRALLDALAVEILARHHDYSLPAAGESWQSFLRNNAMSFRRALLRYRDRAKVHIGTRPDEKQYDTVETQLRFMTENGFSLRDGLYAISAVSHFTLGAVLEQQEHTAALTDRPAAPDENLPPLLREALQIMDSDDGEQAFLHGLESLIRGFEVQLTALLQIV

SEQ ID NO: 116 - protein, 208 aa, Artificial
  Modified tetracycline repressor
MSRLDKSKVINSALELLNEVGIEGLTTRKLAQKLGVEQPTLYWHVKNKRALLDALAVEILARHHDYSLPAAGESWQSFLRNNAMSFRRALLRYGDWAKVHLGTRPDEKQYDTVETQLRFMTENGFSLRDGLYAISAVSHFTLGAVLEQQEHTAALTDRPAAPDENLPPLLREALQIMDSDDGEQAFLHGLESLIRGFEVQLTALLQIV

SEQ ID NO: 117 - protein, 208 aa, Artificial
  Modified tetracycline repressor
MSRLDKSKVINSALELLNEVGIEGLTTRKLAQKLGVEQPTLYWHVKNKRALLDALAVEILARHHDYSLPAAGESWQSFLRNNAMSFRRALLRYRGRAKVLLGTRPDEKQYDTVETQLRFMTENGFSLRDGLYAISAVSHFTLGAVLEQQEHTAALTDRPAAPDENLPPLLREALQIMDSDDGEQAFLHGLESLIRGFEVQLTALLQIV

SEQ ID NO: 118 - protein, 208 aa, Artificial
  Modified tetracycline repressor
MSRLDKSKVINSALELLNEVGIEGLTTRKLAQKLGVEQPTLYWHVKNKRALLDALAVEILARHHDYSLPAAGESWQSFLRNNAMSFRRALLRYRDQAKVHLSTRPDEKQYDTVETQLRFMTENGFSLRDGLYAISAVSHFTLGAVLEQQEHTAALTDRPAAPDENLPPLLREALQIMDSDDGEQAFLHGLESLIRGFEVQLTALLQIV

SEQ ID NO: 119 - protein, 208 aa, Artificial
  Modified tetracycline repressor
MSRLDKSKVINSALELLNEVGIEGLTTRKLAQKLGVEQPTLYWHVKNKRALLDALAVEILARHHDYSLPAAGESWQSFLRNNAMSFRRALLRYREGEKVHLGTRPDEKQYDTVETQLRFMTENGFSLRDGLYAISAVSHFTLGAVLEQQEHTAALTDRPAAPDENLPPLLREALQIMDSDDGEQAFLHGLESLIRGFEVQLTALLQIV

SEQ ID NO: 120 - protein, 208 aa, Artificial
  Modified tetracycline repressor
MSRLDKSKVINSALELLNEVGIEGLTTRKLAQKLGVEQPTLYWHVKNKRALLDALAVEILARHHDYSLPAAGESWQSFLRNNAMSFRRALLRSREGAKVHLATRPDEKQYDTVETQLRFMTENGFSLRDGLYAISAVSHFTLGAVLEQQEHTAALTDRPAAPDENLPPLLREALQIMDSDDGEQAFLHGLESLIRGFEVQLTALLQIV

SEQ ID NO: 121 - protein, 208 aa, Artificial
  Modified tetracycline repressor
MSRLDKSKVINSALELLNEVGIEGLTTRKLAQKLGVEQPTLYWHVKNKRALLDALAVEILARHHDYSLPAAGESWQSFLRNNAMSFRRALLRFRDWEKVNLGTRPDEKQYDTVETQLRFMTENGFSLRDGLYAISAVSHFTLGAVLEQQEHTAALTDRPAAPDENLPPLLREALQIMDSDDGEQAFLHGLESLIRGFEVQLTALLQIV

SEQ ID NO: 122 - protein, 208 aa, Artificial
  Modified tetracycline repressor
MSRLDKSKVINSALELLNEVGIEGLTTRKLAQKLGVEQPTLYWHVKNKRALLDALAVEILARHHDYSLPATGESWQSFLRNNAMSFRRALLRYRDEAKVHLGTRPDEKQYDTVETQLRFMTENGFSLRDGLYAISAVSHFTLGAVLEQQEHTAALTDRPAAPDENLPPLLREALQIMDSDDGEQAFLHGLESLIRGFEVQLTALLQIV

SEQ ID NO: 123 - protein, 208 aa, Artificial
  Modified tetracycline repressor
MSRLDKSKVINSALELLNEVGIEGLTTRKLAQKLGVEQPTLYWHVKNKRALLDALAVEILARHHDYSLPAAGESWQSFLRNNAMSFRRALLRYRDRSKLHLGTRPDEKQYDTVETQLRFMTENGFSLRDGLYAISAVSHFTLGAVLEQQEHTAALTDRPAAPDENLPPLLREALQIMDSDDGEQAFLHGLESLIRGFEVQLTALLQIV

SEQ ID NO: 124 - protein, 208 aa, Artificial
  Modified tetracycline repressor
MSRLDKSKVINSALELLNEVGIEGLTTRKLAQKLGVEQPTLYWHVKNKRALLDALAVEILARHHDYSLPAAGESWQSFLRNNAMSFRRALLRYRDGTRGHLGTRPDEKQYDTVETQLRFMTENGFSLRDGLYAISAVSHFTLGAVLEQQEHTAALTDRPAAPDENLPPLLREALQIMDSDDGEQAFLHGLESLIRGFEVQLTALLQIV

SEQ ID NO: 125 - protein, 208 aa, Artificial
  Modified tetracycline repressor
MSRLDKSKVINSALELLNEVGIEGLTTRKLAQKLGVEQPTLYWHVKNKRALLDALAVEILARHHDYSLPAAGESWQSFLRNNAMSFRRALLRYRDGAKGPLGTRPDEKQYDTVETQLRFMTENGFSLRDGLYAISAVSHFTLGAVLEQQEHTAALTDRPAAPDENLPPLLREALQIMDSDDGEQAFLHGLESLIRGFEVQLTALLQIV

SEQ ID NO: 126 - protein, 208 aa, Artificial; identical to SEQ ID NO: 118
  Modified tetracycline repressor

SEQ ID NO: 127 - protein, 208 aa, Artificial
  Modified tetracycline repressor
MSRLDKSKVINSALELLNEVGIEGLTTRKLAQKLGVEQPTLYWHVKNKRALLDALAVEILARHHDYSLPAAGESWQSFVRNNAMSFRRALLRYRDGTRGHLGTRPDEKQYDTVETQLRFMTENGFSLRDGLYAISAVSHFTLGAVLEQQEHTAALTDRPAAPDENLPPLLREALQIMDSDDGEQAFLHGLESLIRGFEVQLTALLQIV

SEQ ID NO: 128 - protein, 208 aa, Artificial; identical to SEQ ID NO: 124
  Modified tetracycline repressor

SEQ ID NO: 129 - protein, 208 aa, Artificial
  Modified tetracycline repressor
MSRLDKSKVINSALELLNEVGIEGLTTRKLAQKLGVEQPTLYWHVKNKRALLDALAVEILARHHDYSLPAAGESWQSFLRNNAMSFRRALLRYLAGAKVQLGTRPDEKQYDTVETQLRFMTENGFSLRDGLYAISAVSHFTLGAVLEQQEHTAALTDRPAAPDENLPPLLREALQIMDSDDGEQAFLHGLESLIRGFEVQLTALLQIV

SEQ ID NO: 130 - protein, 208 aa, Artificial
  Modified tetracycline repressor
MSRLDKSKVINSALELLNEVGIEGLTTRKLAQKLGVEQPTLYWHVKNKRALLDALAVEILARHHDYSLPAAGESWQSFLRNNAMSFRRALLRYRYGAKEHLGTRPDEKQYDTVETQLRFMTENGFSLRDGLYAISAVSHFTLGAVLEQQEHTAALTDRPAAPDENLPPLLREALQIMDSDDGEQAFLHGLESLIRGFEVQLTALLQIV

SEQ ID NO: 131 - protein, 208 aa, Artificial; identical to SEQ ID NO: 129
  Modified tetracycline repressor

SEQ ID NO: 132 - protein, 208 aa, Artificial; identical to SEQ ID NO: 123
  Modified tetracycline repressor

SEQ ID NO: 133 - protein, 208 aa, Artificial
  Modified tetracycline repressor
MSRLDKSKVINSALELLNEVGIEGLTTRKLAQKLGVEQPTLYWHVKNKRALLDALAVEILARHHDYSLPAAGESWQSFLRNNAMSFRRALLRHRDWAQGHLGTRPDEKQYDTVETQLRFMTENGFSLRDGLYAISAVSHFTLGAVLEQQEHTAALTDRPAAPDENLPPLLREALQIMDSDDGEQAFLHGLESLIRGFEVQLTALLQIV

SEQ ID NO: 134 - protein, 208 aa, Artificial; identical to SEQ ID NO: 118
  Modified tetracycline repressor

SEQ ID NO: 135 - protein, 208 aa, Artificial
  Modified tetracycline repressor
MSRLDKSKVINSALELLNEVGIEGLTTRKLAQKLGVEQPTLYWHVKNKRALLDALAVEILARHHDYSLPAAGESWQSFLRNNAMSFRRALLRNRDWAKGHLGTRPDEKQYDTVETQLRFMTENGFSLRDGLYAISAVSHFTLGAVLEQQEHTAALTDRPAAPDENLPPLLREALQIMDSDDGEQAFLHGLESLIRGFEVQLTALLQIV

SEQ ID NO: 136 - protein, 208 aa, Artificial
  Modified tetracycline repressor
MSRLDKSKVINSALELLNEVGIEGLTTRKLAQKLGVEQPTLYWHVKNKRALLDALAVEILARHHDYSLPAAGESWQSFLRNNAMSFRRALLRYRDGAKGHLGTRPDEKQYDTVETQLRFMTENGFSLRDGLYAISAVSHFTLGAVLEQQEHTAALTDRPAAPDENLPPLLREALQIMDSDDGEQAFLHGLESLIRGFEVQLTALLQIV

SEQ ID NO: 137 - protein, 208 aa, Artificial
  Modified tetracycline repressor
MSRLDKSKVINSALELLNEVGIEGLTTRKLAQKLGVEQPTLYWHVKNKRALLDALAVEILARHHDYSLPAAGESWQSFLRNNAMSFRRALLRYRDGTKGHLGTRPDEKQYDTVETQLRFMTENGFSLRDGLYAISAVSHFTLGAVLEQQEHTAALTDRPAAPDENLPPLLREALQIMDSDDGEQAFLHGLESLIRGFEVQLTALLQIV

SEQ ID NO: 138 - protein, 208 aa, Artificial
  Modified tetracycline repressor
MSRLDKSKVINSALELLNEVGIEGLTTRKLAQKLGVEQPTLYWHVKNKRALLDALAVEILARHHDYSLPAAGESWQSFLRNNAMSFRRALLRYRDGPRDHLGTRPDEKQYDTVETQLRFMTENGFSLRDGLYAISAVSHFTLGAVLEQQEHTAALTDRPAAPDENLPPLLREALQIMDSDDGEQAFLHGLESLIRGFEVQLTALLQIV

SEQ ID NO: 139 - protein, 208 aa, Artificial
  Modified tetracycline repressor
MSRLDKSKVINSALELLNEVGIEGLTTRKLAQKLGVEQPTLYWHVKNKRALLDALAVEILARHHDYSLPAAGESWQSFLRNNAMSFRRALLRFRNGAKFHLGTRPDEKQYDTVETQLRFMTENGFSLRDGLYAISAVSHFTLGAVLEQQEHTAALTDRPAAPDENLPPLLREALQIMDSDDGEQAFLHGLESLIRGFEVQLTALLQIV

SEQ ID NO: 140 - protein, 208 aa, Artificial
  Modified tetracycline repressor
MSRLDKSKVINSALELLNEVGIEGLTTRKLAQKLGVEQPTLYWHVKNKRALLDALAVEILARHHDYSLPAAGESWQSFLRNNAMSFRRALLRYRAGAKGHLGTRPDEKQYDTVETQLRFMTENGFSLRDGLYAISAVSHFTLGAVLEQQEHTAALTDRPAAPDENLPPLLREALQIMDSDDGEQAFLHGLESLIRGFEVQLTALLQIV

SEQ ID NO: 141 - protein, 208 aa, Artificial
  Modified tetracycline repressor
MSRLDKSKVINSALELLNEVGIEGLTTRKLAQKLGVEQPTLYWHVKNKRALLDALAVEILGRHHDYSLPAAGESWQSFLRNNAMSFRRALLRYRAGAKGHLGTRPDEKQYDTVETQLRFMTENGFSLRDGLYAISAVSHFTLGAVLEQQEHTAALTDRPAAPDENLPPLLREALQIMDSDDGEQAFLHGLESLIRGFEVQLTALLQIV

SEQ ID NO: 142 - protein, 208 aa, Artificial
  Modified tetracycline repressor
MSRLDKSKVINSALELLNEVGIEGLTTRKLAQKLGVEQPTLYWHVKNKRALLDSLAVEILARHHDYSLPAAGESWQSFLRNNAMSFRRALLRYRDGAKRHLGTRPDEKQYDTVETQLRFMTENGFSLRDGLYAISAVSHFTLGAVLEQQEHTAALTDRPAAPDENLPPLLREALQIMDSDDGEQAFLHGLESLIRGFEVQLTALLQIV

SEQ ID NO: 143 - protein, 208 aa, Artificial
  Modified tetracycline repressor
MSRLDKSKVINSALELLNEVGIEGLTTRKLAQKLGVEQPTLYWHVKNKRALLYALAVEILPRHHDYSLPAAGESWQSFLRNNAMSFRRALLRYRDGAKVHLGTRPDEKQYDTVETQLRFMTENGFSLRDGLYAISAVSHFTLGAVLEQQEHTAALTDRPAAPDENLPPLLREALQIMDSDDGEQAFLHGLESLIRGFEVQLTALLQIV

SEQ ID NO: 144 - protein, 208 aa, Artificial
  Modified tetracycline repressor
MSRLDKSKVINSALELLNEVGIEGLTTRKLAQKLGVEQPTLYWHVKNKRALLDALAVEIVARHHDYSLPAAGESWQSFLRNNAMSFRRALLRYRDGVKGHLGTRPDEKQYDTVETQLRFMTENGFSLRDGLYAISAVSHFTLGAVLEQQEHTAALTDRPAAPDENLPPLLREALQIMDSDDGEQAFLHGLESLIRGFEVQLTALLQIV

SEQ ID NO: 145 - protein, 208 aa, Artificial
  Modified tetracycline repressor
MSRLDKSKVINSALELLNEVGIEGLTTRKLAQKLGVEQPTLYWHVKNKRALLDALSVEILARHHDYSLPAAGESWQSFLRNNAMSFRRALLRYRDGAKEHLGTRPDEKQYDTVETQLRFMTENGFSLRDGLYAISAVSHFTLGAVLEQQEHTAALTDRPAAPDENLPPLLREALQIMDSDDGEQAFLHGLESLIRGFEVQLTALLQIV

SEQ ID NO: 146 - protein, 208 aa, Artificial
  Modified tetracycline repressor
MSRLDKSKVINSALELLNEVGIEGLTTRKLAQKLGVEQPTLYWHVKNKRALLDALSVEAWARHHDYSLPAAGESWQSFLRNNAMSFRRALLRYRDGAKVHLGTRPDEKQYDTVETQLRFMTENGFSLRDGLYAISAVSHFTLGAVLEQQEHTAALTDRPAAPDENLPPLLREALQIMDSDDGEQAFLHGLESLIRGFEVQLTALLQIV

SEQ ID NO: 147 - protein, 208 aa, Artificial
  Modified tetracycline repressor
MSRLDKSKVINSALELLNEVGIEGLTTRKLAQKLGVEQPTLYWHVKNKRALLDALAVEILARHHDYSLPAAGESWQSFLRNNAMSFRRALLRYRDRAKLHIGTRPDEKQYDTVETQLRFMTENGFSLRDGLYAISAVSHFTLGAVLEQQEHTAALTDRPAAPDENLPPLLREALQIMDSDDGEQAFLHGLESLIRGFEVQLTALLQIV

SEQ ID NO: 148 - protein, 208 aa, Artificial
  Modified tetracycline repressor
MSRLDKSKVINSALELLNEVGIEGLTTRKLAQKLGVEQPTLYWHVKNKRALLDALAVEILTRHHDYSLPAAGESWQSFLRNNAMSFRRALLRYRDGAKRHLGTRPDEKQYDTVETQLRFMTENGFSLRDGLYAISAVSHFTLGAVLEQQEHTAALTDRPAAPDENLPPLLREALQIMDSDDGEQAFLHGLESLIRGFEVQLTALLQIV

SEQ ID NO: 149 - protein, 208 aa, Artificial
  Modified tetracycline repressor
MSRLDKSKVINSALELLNEVGIEGLTTRKLAQKLGVEQPTLYWHVKNKRALLDALAVESLAGHHDYSLPAAGESWQSFLRNNAMSFRRALLRYRAGAKLHLGTRPDEKQYDTVETQLRFMTENGFSLRDGLYAISAVSHFTLGAVLEQQEHTAALTDRPAAPDENLPPLLREALQIMDSDDGEQAFLHGLESLIRGFEVQLTALLQIV

SEQ ID NO: 150 - protein, 208 aa, Artificial
  Modified tetracycline repressor
MSRLDKSKVINSALELLNEVGIEGLTTRKLAQKLGVEQPTLYWHVKNKRALLDALAVEILARHHDYSLPAAGESWQSFLRNNAMSFRRALLRYRDGAKRHLGTRPDEKQYDTVETQLRFMTENGFSLRDGLYAISAVSHFTLGAVLEQQEHTAALTDRPAAPDENLPPLLREALQIMDSDDGEQAFLHGLESLIRGFEVQLTALLQIV

SEQ ID NO: 151 - protein, 208 aa, Artificial
  Modified tetracycline repressor
MSRLDKSKVINSALELSNEVGIKGLTTRKLAQKLGVEQPTLYWHVKNKRALLDALAVEILARHHDYSLPAAGESWQSFLRNNAMSFRRALLRYRDGAKVHLGTRPDEKQYDTVETQLRFMTENGFSLRDGLYAISAVSHFTLGAVLEQQEHTAALTDRPAAPDENLPPLLREALQIMDSDDGEQAFLHGLESLIRGFEVQLTALLQIV

SEQ ID NO: 152 - protein, 208 aa, Artificial
  Modified tetracycline repressor
MSRLDKSKVINSALELHNEVGFGGLTTRKLAQKLGVEQPTLYWHVKNKRALLDALAVEILARHHDYSLPAAGESWQSFLRNNAMSFRRALLRYRDGAKVHLGTRPDEKQYDTVETQLRFMTENGFSLRDGLYAISAVSHFTLGAVLEQQEHTAALTDRPAAPDENLPPLLREALQIMDSDDGEQAFLHGLESLIRGFEVQLTALLQIV

SEQ ID NO: 153 - protein, 208 aa, Artificial
  Modified tetracycline repressor
MSRLDKSKVINSALELLKDLGNAGLTTRKLAQKLGVEQPTLYWHVKNKRALLDALAVEILARHHDYSLPAAGESWQSFLRNNAMSFRRALLRYRDGAKVHLGTRPDEKQYDTVETQLRFMTENGFSLRDGLYAISAVSHFTLGAVLEQQEHTAALTDRPAAPDENLPPLLREALQIMDSDDGEQAFLHGLESLIRGFEVQLTALLQIV

SEQ ID NO: 154 - protein, 208 aa, Artificial
  Modified tetracycline repressor
MSRLDKSKVINSALVLANDVGIEGLTTRKLAQKLGVEQPTLYWHVKNKRALLDALAVEILARHHDYSLPAAGESWQSFLRNNAMSFRRALLRYRDGAKVHLGTRPDEKQYDTVETQLRFMTENGFSLRDGLYAISAVSHFTLGAVLEQQEHTAALTDRPAAPDENLPPLLREALQIMDSDDGEQAFLHGLESLIRGFEVQLTALLQIV

SEQ ID NO: 155 - protein, 207 aa, Artificial
  Modified tetracycline repressor
MSRLDKSKVINSALELFNVGIEGLTTRKLAQKLGVEQPTLYWHVKNKRALLDALAVEILARHHDYSLPAAGESWQSFLRNNAMSFRRALLRYRDGAKVHLGTRPDEKQYDTVETQLRFMTENGFSLRDGLYAISAVSHFTLGAVLEQQEHTAALTDRPAAPDENLPPLLREALQIMDSDDGEQAFLHGLESLIRGFEVQLTALLQIV

SEQ ID NO: 156 - protein, 208 aa, Artificial
  Modified tetracycline repressor
MSRLDKSKVINSASELLYEVGFEGLTTRKLAQKLGVEQPTLYWHVKNKRALLDALAVEILARHHDYSLPAAGESWQSFLRNNAMSFRRALLRYRDGAKVHLGTRPDEKQYDTVETQLRFMTENGFSLRDGLYAISAVSHFTLGAVLEQQEHTAALTDRPAAPDENLPPLLREALQIMDSDDGEQAFLHGLESLIRGFEVQLTALLQIV

SEQ ID NO: 157 - protein, 208 aa, Artificial
  Modified tetracycline repressor
MSRLDKSKVINSALALGNEVGIEGVTTRKLAQKLGVEQPTLYWHVKNKRALLDALAVEILARHHDYSLPAAGESWQSFLRNNAMSFRRALLRYRDGAKVHLGTRPDEKQYDTVETQLRFMTENGFSLRDGLYAISAVSHFTLGAVLEQQEHTAALTDRPAAPDENLPPLLREALQIMDSDDGEQAFLHGLESLIRGFEVQLTALLQIV

SEQ ID NO: 158 - protein, 208 aa, Artificial
  Modified tetracycline repressor
MSRLDKSKVINSASELLKEVGIVGLTTRKLAQKLGVEQPTLYWHVKNKRALLDALAVEILARHHDYSLPAAGESWQSFLRNNAMSFRRALLRYRDGAKVHLGTRPDEKQYDTVETQLRFMTENGFSLRDGLYAISAVSHFTLGAVLEQQEHTAALTDRPAAPDENLPPLLREALQIMDSDDGEQAFLHGLESLIRGFEVQLTALLQIV

SEQ ID NO: 159 - protein, 208 aa, Artificial
  Modified tetracycline repressor
MSRLDKSKVINSATELLYEVGFEGLTTRKLAQKLGVEQPTLYWHVKNKRALLDALAVEILARHHDYSLPAAGESWQSFLRNNAMSFRRALLRYRDGAKVHLGTRPDEKQYDTVETQLRFMTENGFSLRDGLYAISAVSHFTLGAVLEQQEHTAALTDRPAAPDENLPPLLREALQIMDSDDGEQAFLHGLESLIRGFEVQLTALLQIV

SEQ ID NO: 160 - protein, 208 aa, Artificial
  Modified tetracycline repressor
MSRLDKSKVINSALELGNEVGMEGLTTRKLAQKLGVEQPTLYWHVKNKRALLDALAVEILARHHDYSLPAAGESWQSFLRNNAMSFRRALLRYRDGAKVHLGTRPDEKQYDTVETQLRFMTENGFSLRDGLYAISAVSHFTLGAVLEQQEHTAALTDRPAAPDENLPPLLREALQIMDSDDGEQAFLHGLESLIRGFEVQLTALLQIV

SEQ ID NO: 161 - protein, 208 aa, Artificial
  Modified tetracycline repressor
MSRLDKSKVINSALELLNEGAIGGLTTRKLAQKLGVEQPTLYWHVKNKRALLDALAVEILARHHDYSLPAAGESWQSFLRNNAMSFRRALLRYRDGAKVHLGTRPDEKQYDTVETQLRFMTENGFSLRDGLYAISAVSHFTLGAVLEQQEHTAALTDRPAAPDENLPPLLREALQIMDSDDGEQAFLHGLESLIRGFEVQLTALLQIV

SEQ ID NO: 162 - protein, 208 aa, Artificial
  Modified tetracycline repressor
MSRLDKSKVINSALELLNEGRNEGLTTRKLAQKLGVEQPTLYWHVKNKRALLDALAVEILARHHDYSLPAAGESWQSFLRNNAMSFRRALLRYRDGAKVHLGTRPDEKQYDTVETQLRFMTENGFSLRDGLYAISAVSHFTLGAVLEQQEHTAALTDRPAAPDENLPPLLREALQIMDSDDGEQAFLHGLESLIRGFEVQLTALLQIV

SEQ ID NO: 163 - protein, 208 aa, Artificial
  Modified tetracycline repressor
MSRLDKSKVINSALELLIGGGIVGLTTRKLAQKLGVEQPTLYWHVKNKRALLDALAVEILARHHDYSLPAAGESWQSFLRNNAMSFRRALLRYRDGAKVHLGTRPDEKQYDTVETQLRFMTENGFSLRDGLYAISAVSHFTLGAVLEQQEHTAALTDRPAAPDENLPPLLREALQIMDSDDGEQAFLHGLESLIRGFEVQLTALLQIV

SEQ ID NO: 164 - protein, 208 aa, Artificial; identical to SEQ ID NO: 156
  Modified tetracycline repressor

SEQ ID NO: 165 - protein, 208 aa, Artificial
  Modified tetracycline repressor
MSRLDKSKVINSALELLDERGNEGLTTRKLAQKLGVEQPTLYWHVKNKRALLDALAVEILARHHDYSLPAAGESWQSFLRNNAMSFRRALLRYRDGAKVHLGTRPDEKQYDTVETQLRFMTENGFSLRDGLYAISAVSHFTLGAVLEQQEHTAALTDRPAAPDENLPPLLREALQIMDSDDGEQAFLHGLESLIRGFEVQLTALLQIV

SEQ ID NO: 166 - protein, 208 aa, Artificial; identical to SEQ ID NO: 162
  Modified tetracycline repressor

SEQ ID NO: 167 - protein, 208 aa, Artificial
  Modified tetracycline repressor
MSRLDKSKVINSALELLYEDGTEGLTTRKLAQKLGVEQPTLYSHVKNKRALLDALAVEILARHHDYSLPAAGESWQSFLRNNAMSFRRALLRYRDGAKVHLGTRPDEKQYDTVETQLRFMTENGFSLRDGLYAISAVSHFTLGAVLEQQEHTAALTDRPAAPDENLPPLLREALQIMDSDDGEQAFLHGLESLIRGFEVQLTALLQIV

SEQ ID NO: 168 - protein, 208 aa, Artificial
  Modified tetracycline repressor
MSRLDKSKVINSALELLYDVGTEGLTTRKLAQKLGVEQPTLYWHVKNKRALLDALAVEILARHHDYSLPAAGESWQSFLRNNAMSFRRALLRYRDGAKVHLGTRPDEKQYDTVETQLRFMTENGFSLRDGLYAISAVSHFTLGAVLEQQEHTAALTDRPAAPDENLPPLLREALQIMDSDDGEQAFLHGLESLIRGFEVQLTALLQIV

SEQ ID NO: 169 - protein, 208 aa, Artificial
  Modified tetracycline repressor
MSRLDKSKVINSALELVYEVGTEGLTTRKLAQKLGVEQPTLYWHVKNKRALLDALAVEILARHHDYSLPAAGESWQSFLRNNAMSFRRALLRYRDGAKVHLGTRPDEKQYDTVETQLRFMTENGFSLRDGLYAISAVSHFTLGAVLEQQEHTAALTDRPAAPDENLPPLLREALQIMDSDDGEQAFLHGLESLIRGFEVQLTALLQIV

SEQ ID NO: 170 - protein, 208 aa, Artificial
  Modified tetracycline repressor
MSRLDKSKVINSALELSNEVGIDGLTTRKLAQKLGVEQPTLYWHVKNKRALLDALAVEILARHHDYSLPAAGESWQSFLRNNAMSFRRALLRYRDGAKVHLGTRPDEKQYDTVETQLRFMTENGFSLRDGLYAISAVSHFTLGAVLEQQEHTAALTDRPAAPDENLPPLLREALQIMDSDDGEQAFLHGLESLIRGFEVQLTALLQIV

SEQ ID NO: 171 - protein, 208 aa, Artificial
  Modified tetracycline repressor
MSRLDKSKVINSALVLFYEVGMKGLTTRKLAQKLGVEQPTLYWHVKNKRALLDALAVEILARHHDYSLPAAGESWQSFLRNNAMSFRRALLRYRDGAKVHLGTRPDEKQYDTVETQLRFMTENGFSLRDGLYAISAVSHFTLGAVLEQQEHTAALTDRPAAPDENLPPLLREALQIMDSDDGEQAFLHGLESLIRGFEVQLTALLQIV

SEQ ID NO: 172 - protein, 205 aa, Artificial
  Modified tetracycline repressor
MSRLDKSKVINSALELLNEVSLTTRKLAQKLGVEQPTLYWHVKNKRALLDALAVEILARHHDYSLPAAGESWQSFLRNNAMSFRRALLRYRDGAKVHLGTRPDEKQYDTVETQLRFMTENGFSLRDGLYAISAVSHFTLGAVLEQQEHTAALTDRPAAPDENLPPLLREALQIMDSDDGEQAFLHGLESLIRGFEVQLTALLQIV

SEQ ID NO: 173 - protein, 208 aa, Artificial
  Modified tetracycline repressor
MSRLDKSKVINSAEELLNEGGIEGLTTRKLAQKLGVEQPTLYWHVKNKRALLDALAVEILARHHDYSLPAAGESWQSFLRNNAMSFRRALLRYRDGAKVHLGTRPDEKQYDTVETQLRFMTENGFSLRDGLYAISAVSHFTLGAVLEQQEHTAALTDRPAAPDENLPPLLREALQIMDSDDGEQAFLHGLESLIRGFEVQLTALLQIV

SEQ ID NO: 174 - protein, 208 aa, Artificial
  Modified tetracycline repressor
MSRLDKSKVINSAEELSNEGGIDGLTTRKLAQKLGVEQPTLYWHVKNKRALLDALAVEILARHHDYSLPAAGESWQSFLRNNAMSFRRALLRYRDGAKVHLGTRPDEKQYDTVETQLRFMTENGFSLRDGLYAISAVSHFTLGAVLEQQEHTAALTDRPAAPDENLPPLLREALQIMDSDDGEQAFLHGLESLIRGFEVQLTALLQIV

SEQ ID NO: 175 - protein, 208 aa, Artificial
  Modified tetracycline repressor
MSRLDKSKVINSALDLLNEVGIEGLTTRKLAQKLGVEQPTLYWHVKNKRALLDALAVEILARHHDYSLPAAGESWQSFLRNNAMSFRRALLRYRDRAKVHLGTRPDEKQYDTVETQLRFMTENGFSLRDGLYAISAVSHFTLGAVLEQQEHTAALTDRPAAPDENLPPLLREALQIMDSDDGEQAFLHGLESLIRGFEVQLTALLQIV

SEQ ID NO: 176 - protein, 208 aa, Artificial; identical to SEQ ID NO: 162
  Modified tetracycline repressor

SEQ ID NO: 177 - protein, 208 aa, Artificial
  Modified tetracycline repressor
MSRLDKSKVINSAVELVKEVGIEGLTTRKLAQKLGVEQPTLYWHVKNKRALLDALAVEILARHHDYSLPAAGESWQSFLRNNAMSFRRALLRYRDGAKVHLGTRPDEKQYDTVETQLRFMTENGFSLRDGLYAISAVSHFTLGAVLEQQEHTAALTDRPAAPDENLPPLLREALQIMDSDDGEQAFLHGLESLIRGFEVQLTALLQIV

SEQ ID NO: 178 - protein, 208 aa, Artificial
  Modified tetracycline repressor
MSRLDKSKVINSALELLYEVGIEGLTTRKLAQKLGVEQPTLYWHVKNKRALLYALAVETLARHHDYSLPAAGESWQSFLRNNAMSFRRALLRYRDGAKVHLGTRPDEKQYDTVETQLRFMTENGFSLRDGLYAISAVSHFTLGAVLEQQEHTAALTDRPAAPDENLPPLLREALQIMDSDDGEQAFLHGLESLIRGFEVQLTALLQIV

SEQ ID NO: 179 - protein, 208 aa, Artificial
  Modified tetracycline repressor
MSRLDKSKVINSALELLYEVGIVGLTTRKLAQKLGVEQPTLYWHVKNKRALLASLSVEILTRYHDYSLPAAGESWQSFLRNNAMSFRRALLRYRDGAKVHLGTRPDEKQYDTVETQLRFMTENGFSLRDGLYAISAVSHFTLGAVLEQQEHTAALTDRPAAPDENLPPLLREALQIMDSDDGEQAFLHGLESLIRGFEVQLTALLQIV

SEQ ID NO: 180 - protein, 208 aa, Artificial; identical to SEQ ID NO: 115
  Modified tetracycline repressor

SEQ ID NO: 181 - protein, 208 aa, Artificial
  Modified tetracycline repressor
MSRLDKSKVINSALELLNEVGIEGLTTRKLAQKLGVEQPTLYWHVKNKRALLDALAVEILARHHDYSLPAAGESWQSFLRNNAMSFRRALLRNRDGAKVHFDTRPDEKQYDTVETQLRFMTENGFSLRDGLYAISAVSHFTLGAVLEQQEHTAALTDRPAAPDENLPPLLREALQIMDSDDGEQAFLHGLESLIRGFEVQLTALLQIV

SEQ ID NO: 182 - protein, 208 aa, Artificial
  Modified tetracycline repressor
MSRLDKSKVINSAIELLNEVGLEGLTTRKLAQKLGVEQPTLYWHVKNKRALLDALAVEILARHHDYSLPAAGESWQSFLRNNAMSFRRALLRYHDGAKEHLGTRPDEKQYDTVETQLRFMTENGFSLRDGLYAISAVSHFTLGAVLEQQEHTAALTDRPAAPDENLPPLLREALQIMDSDDGEQAFLHGLESLIRGFEVQLTALLQIV

SEQ ID NO: 183 - protein, 208 aa, Artificial
  Modified tetracycline repressor
MSRLDKSKVINSARELLNEVGIEGLTTRKLAQKLGVEQPTLYWHVKNKRALLDALAVEILARHHDYSLPAAGESWQSFLRNNAMSFRRALLRYRHGAKVHPGTRPDEKQYDTVETQLRFMTENGFSLRDGLYAISAVSHFTLGAVLEQQEHTAALTDRPAAPDENLPPLLREALQIMDSDDGEQAFLHGLESLIRGFEVQLTALLQIV

SEQ ID NO: 184 - protein, 208 aa, Artificial
  Modified tetracycline repressor
MSRLDKSKVINSALELFREVGIEGLTTRKLAQKLGVEQPTLYWHVKNKRALLNALAVEMLTRHHDYSLPAAGESWQSFLRNNAMSFRRALLRYRDGAKVHLGTRPDEKQYDTVETQLRFMTENGFSLRDGLYAISAVSHFTLGAVLEQQEHTAALTDRPAAPDENLPPLLREALQIMDSDDGEQAFLHGLESLIRGFEVQLTALLQIV

SEQ ID NO: 185 - protein, 208 aa, Artificial
  Modified tetracycline repressor
MSRLDKSKVINSALELLYEVEIKGLTTRKLAQKLGVEQPTLYWHVKNKRALLDALAVEILARHHDYSLPAAGESWQSFLRNNAMSFRRALLRYRDGAKVHLGTRPDEKQYDTVETQLRFMTENGFSLRDGLYAISAVSHFTLGAVLEQQEHTAALTDRPAAPDENLPPLLREALQIMDSDDGEQAFLHGLESLIRGFEVQLTALLQIV

SEQ ID NO: 186 - protein, 208 aa, Artificial
  Modified tetracycline repressor
MSRLDKSKVINSALELLNEVGIHGLTTRKLAQKLGVEQPTLYWHVKNKRALLYALAVQTLARHHDYSLPAAGESWQSFLRNNAMSFRRALLRYRDGAKVHLGTRPDEKQYDTVETQLRFMTENGFSLRDGLYAISAVSHFTLGAVLEQQEHTAALTDRPAAPDENLPPLLREALQIMDSDDGEQAFLHGLESLIRGFEVQLTALLQIV

SEQ ID NO: 187 - protein, 208 aa, Artificial
  Modified tetracycline repressor
MSRLDKSKVINSALELLNDEGIKGLTTRKLAQKLGVEQPTLYWHVKNKRALLDALALENFARHHDYSLPAAGESWQSFLRNNAMSFRRALLRYRDGAKVHLGTRPDEKQYDTVETQLRFMTENGFSLRDGLYAISAVSHFTLGAVLEQQEHTAALTDRPAAPDENLPPLLREALQIMDSDDGEQAFLHGLESLIRGFEVQLTALLQIV

SEQ ID NO: 188 - protein, 208 aa, Artificial
  Modified tetracycline repressor
MSRLDKSKVINSAIELLNEVRIEGLTTRKLAQKLGVEQPTLYWHVKNKRALLDALVVEILARHHDYSLPAAGESWQSFLRNNAMSFRRALLRYRDGAKVHLGTRPDEKQYDTVETQLRFMTENGFSLRDGLYAISAVSHFTLGAVLEQQEHTAALTDRPAAPDENLPPLLREALQIMDSDDGEQAFLHGLESLIRGFEVQLTALLQIV

SEQ ID NO: 189 - protein, 208 aa, Artificial
  Modified tetracycline repressor
MSRLDKSKVINSALELLNEVGIEGLTTRKLAQKLGVEQPTLYWHVKNKRALLDALAVEILARHHDYSLPAAGESWQSFLRNNAMSFRRALLRYRARAKVHLGTRPDEKQYDTVETQLRFMTENGFSLRDGLYAISAVSHFTLGAVLEQQEHTAALTDRPAAPDENLPPLLREALQIMDSDDGEQAFLHGLESLIRGFEVQLTALLQIV

SEQ ID NO: 190 - protein, 208 aa, Artificial
  Modified tetracycline repressor
MSRLDKSKVINSALELLKEVGIEGLTTRKLAQKLGVEQPTLYWHVKNKRALLDALAVEILARHHDYSLPAAGESWQSFLRNNAMSFRRALLRYRVVVKVHLGTRPDEKQYDTVETQLRFMTENGFSLRDGLYAISAVSHFTLGAVLEQQEHTAALTDRPAAPDENLPPLLREALQIMDSDDGEQAFLHGLESLIRGFEVQLTALLQIV

SEQ ID NO: 191 - protein, 208 aa, Artificial
  Modified tetracycline repressor
MSRLDKSKVINSAVELLNEVGIEGLTTRKLAQKLGVEQPTLYWHVKNKRALLDALAVEILARHHDYSLPAAGESWQSFLRNNAMSFRRALLRDGGGAKVHLGTRPDEKQYDTVETQLRFMTENGFSLRDGLYAISAVSHFTLGAVLEQQEHTAALTDRPAAPDENLPPLLREALQIMDSDDGEQAFLHGLESLIRGFEVQLTALLQIV

SEQ ID NO: 192 - protein, 208 aa, Artificial
  Modified tetracycline repressor
MSRLDKSKVINSALELLNEVGIEGLTTRKLAQKLGVEQPTLYWHVKNKRALLDALPVHILARYHDYSLPAAGESWQSFLRNNAMSFRRALLRYRDGAKVHLGTRPDEKQYDTVETQLRFMTENGFSLRDGLYAISAVSHFTLGAVLEQQEHTAALTDRPAAPDENLPPLLREALQIMDSDDGEQAFLHGLESLIRGFEVQLTALLQIV

SEQ ID NO: 193 - protein, 205 aa, Artificial; identical to SEQ ID NO: 172
  Modified tetracycline repressor

SEQ ID NO: 194 - protein, 208 aa, Artificial
  Modified tetracycline repressor
MSRLDKSKVINSALELLNEVGIEGLTTRKLAQKLGVEQPTLYWHVKNKRALLDALAVEILARHHDYSLPAAGESWQSFLRNNAMSFRRALLRCREGTKVHLGTRPDEKQYDTVETQLRFMTENGFSLRDGLYAISAVSHFTLGAVLEQQEHTAALTDRPAAPDENLPPLLREALQIMDSDDGEQAFLHGLESLIRGFEVQLTALLQIV

SEQ ID NO: 195 - protein, 208 aa, Artificial
  Modified tetracycline repressor
MSRLDKSKVINSAFELLNEVGIEGLTTRKLAQKLGVEQPTLYWHVKNKRALLDALAVEILARHHDYSLPAAGESWQSFLRNNAMSFRRALLRYRDVAELHPGTRPDEKQYDTVETQLRFMTENGFSLRDGLYAISAVSHFTLGAVLEQQEHTAALTDRPAAPDENLPPLLREALQIMDSDDGEQAFLHGLESLIRGFEVQLTALLQIV

SEQ ID NO: 196 - protein, 208 aa, Artificial
  Modified tetracycline repressor
MSRLDKSKVINSALELLNEVGIEGLTTRKLAQKLGVEQPTLYWHVKNKRALLDALAVEILARHHDYSLPAAGESWQSFLRNNAMSFRRALLRCRDRANVHLGTRPDEKQYDTVETQLRFMTENGFSLRDGLYAISAVSHFTLGAVLEQQEHTAALTDRPAAPDENLPPLLREALQIMDSDDGEQAFLHGLESLIRGFEVQLTALLQIV

SEQ ID NO: 197 - protein, 208 aa, Artificial
  Modified tetracycline repressor
MSRLDKSKVINSAVVLLNEVGIDGLTTRKLAQKLGVEQPTLYWHVKNKRALLDALAVEILARHHDYSLPAAGESWQSFLRNNAMSFRRALLRYRDLAKVHLATRPDEKQYDTVETQLRFMTENGFSLRDGLYAISAVSHFTLGAVLEQQEHTAALTDRPAAPDENLPPLLREALQIMDSDDGEQAFLHGLESLIRGFEVQLTALLQIV

SEQ ID NO: 198 - protein, 208 aa, Artificial
  Modified tetracycline repressor
MSRLDKSKVINSALELLKVVGTEGLTTRKLAQKLGVEQPTLYWHVKNKRALLYSLAVEILARHHDYSLPAAGESWQSFLRNNAMSFRRALLRYRDGAKVHLGTRPDEKQYDTVETQLRFMTENGFSLRDGLYAISAVSHFTLGAVLEQQEHTAALTDRPAAPDENLPPLLREALQIMDSDDGEQAFLHGLESLIRGFEVQLTALLQIV

SEQ ID NO: 199 - protein, 208 aa, Artificial
  Modified tetracycline repressor
MSRLDKSKVINSALELLNEGGIEGLTTRKLAQKLGVEQPTLYWHVKNKRALLDALPVELLARHHDYSLPAAGESWQSFLRNNAMSFRRALLRYRDGAKVHLGTRPDEKQYDTVETQLRFMTENGFSLRDGLYAISAVSHFTLGAVLEQQEHTAALTDRPAAPDENLPPLLREALQIMDSDDGEQAFLHGLESLIRGFEVQLTALLQIV

SEQ ID NO: 200 - protein, 208 aa, Artificial
  Modified tetracycline repressor
MSRLDKSKVINSALELMNDVGIEGLTTRKLAQKLGVEQPTLYWHVKNKRALLYALEVEILARHHDYSLPAAGESWQSFLRNNAMSFRRALLRYRDGAKVHLGTRPDEKQYDTVETQLRFMTENGFSLRDGLYAISAVSHFTLGAVLEQQEHTAALTDRPAAPDENLPPLLREALQIMDSDDGEQAFLHGLESLIRGFEVQLTALLQIV

SEQ ID NO: 201 - protein, 208 aa, Artificial
  Modified tetracycline repressor
MSRLDKSKVINSALELLNEVGIEGLTTRKLAQKLGVEQPTLYWHVKNKRALLDALAELNVARHHDYSLPAAGESWQSFLRNNAMSFRRALLRYRDGAKVHLGTRPDEKQYDTVETQLRFMTENGFSLRDGLYAISAVSHFTLGAVLEQQEHTAALTDRPAAPDENLPPLLREALQIMDSDDGEQAFLHGLESLIRGFEVQLTALLQIV

SEQ ID NO: 202 - protein, 208 aa, Artificial
  Modified tetracycline repressor
MSRLDKSKVINSALALVNEVGIEGLTTRKLAQKLGVEQPTLYWHVKNKRALLDALAVEILARHHDYSLPAAGESWQSFLRNNAMSFRRALLRYRDVAKVHLGTRPDEKQYDTVETQLRFMTENGFSLRDGLYAISAVSHFTLGAVLEQQEHTAALTDRPAAPDENLPPLLREALQIMDSDDGEQAFLHGLESLIRGFEVQLTALLQIV

SEQ ID NO: 203 - protein, 208 aa, Artificial
  Modified tetracycline repressor
MSRLDKSKVINSALELLNEGGNEGLTTRKLAQKLGVEQPTLYWHVKNKQTLLDALAVEILARHHDYSLPAAGESWQSFLRNNAMSFRRALLRYRDGAKVHLGTRPDEKQYDTVETQLRFMTENGFSLRDGLYAISAVSHFTLGAVLEQQEHTAALTDRPAAPDENLPPLLREALQIMDSDDGEQAFLHGLESLIRGFEVQLTALLQIV

SEQ ID NO: 204 - protein, 208 aa, Artificial
  Modified tetracycline repressor
MSRLDKSKVINSALELLNVVGIEGLTTRKLAQKLGVEQPTLYWHVKNKRALLDALAVEILARHHDYSLPAAGESWQSFLRNNAMSFRRALLRCRYGTNLHLGTRPDEKQYDTVETQLRFMTENGFSLRDGLYAISAVSHFTLGAVLEQQEHTAALTDRPAAPDENLPPLLREALQIMDSDDGEQAFLHGLESLIRGFEVQLTALLQIV

SEQ ID NO: 205 - protein, 208 aa, Artificial
  Modified tetracycline repressor
MSRLDKSKVINSALELLNEFRIEGLTTRKLAQKLGVEQPTLYWHVKNKSTLLDALAVEILARHHDYSLPAAGESWQSFLRNNAMSFRRALLRYRDGAKVHLGTRPDEKQYDTVETQLRFMTENGFSLRDGLYAISAVSHFTLGAVLEQQEHTAALTDRPAAPDENLPPLLREALQIMDSDDGEQAFLHGLESLIRGFEVQLTALLQIV

SEQ ID NO: 206 - protein, 208 aa, Artificial
  Modified tetracycline repressor
MSRLDKSKVINSALQLLNEVGIEGLTTRKLAQKLGVEQPTLYWHVKNKRALLDAMAVERLARHHDYSLPAAGESWQSFLRNNAMSFRRALLRYRDGAKVHLGTRPDEKQYDTVETQLRFMTENGFSLRDGLYAISAVSHFTLGAVLEQQEHTAALTDRPAAPDENLPPLLREALQIMDSDDGEQAFLHGLESLIRGFEVQLTALLQIV

SEQ ID NO: 207 - protein, 208 aa, Artificial
  Modified tetracycline repressor
MSRLDKSKVINSALELLYEVGIEGLTTRKLAQKLGVEQPTLYWHVKNKRALLYVLAVEILARHHDYSLPAAGESWQSFLRNNAMSFRRALLRYRDGAKVHLGTRPDEKQYDTVETQLRFMTENGFSLRDGLYAISAVSHFTLGAVLEQQEHTAALTDRPAAPDENLPPLLREALQIMDSDDGEQAFLHGLESLIRGFEVQLTALLQIV

SEQ ID NO: 208 - protein, 208 aa, Artificial; identical to SEQ ID NO: 191
  Modified tetracycline repressor

SEQ ID NO: 209 - protein, 208 aa, Artificial
  Modified tetracycline repressor
MSRLDKSKVINSALELLNEVGIKGLTTRKLAQKLGVEQPTLYWHVKNKRALLDALAVEILARHHDYSLPAAGESWQSFLRNNAMSFRRALLRYRHGAKVHHGTRPDEKQYDTVETQLRFMTENGFSLRDGLYAISAVSHFTLGAVLEQQEHTAALTDRPAAPDENLPPLLREALQIMDSDDGEQAFLHGLESLIRGFEVQLTALLQIV

SEQ ID NO: 210 - protein, 208 aa, Artificial
  Modified tetracycline repressor
MSRLDKSKVINSALELHNEVGFEGLTTRKLAQKLGVEQPTLYWHVKNKRALLDALAVEILARHHDYSLPAAGESWQSFLRNNAMSFRRALLRYRDGPKVALGTRPDEKQYDTVETQLRFMTENGFSLRDGLYAISAVSHFTLGAVLEQQEHTAALTDRPAAPDENLPPLLREALQIMDSDDGEQAFLHGLESLIRGFEVQLTALLQIV

SEQ ID NO: 211 - protein, 208 aa, Artificial
  Modified tetracycline repressor
MSRLDKSKVINSALVLLHDDGIEGLTTRKLAQKLGVEQPTLYWHVKNKRALLDALAVEILARHHDYSLPAAGESWQSFLRNNAMSFRRALLRYPHGAKVNLGTRPDEKQYDTVETQLRFMTENGFSLRDGLYAISAVSHFTLGAVLEQQEHTAALTDRPAAPDENLPPLLREALQIMDSDDGEQAFLHGLESLIRGFEVQLTALLQIV

SEQ ID NO: 212 - protein, 208 aa, Artificial; identical to SEQ ID NO: 125
  Modified tetracycline repressor

SEQ ID NO: 213 - protein, 208 aa, Artificial
  Modified tetracycline repressor
MSRLDKSKVINSALVLLNEAGFQGLTTRKLAQKLGVEQPTLYWHVKNKRALLDALAVEILARHHDYSLPAAGESWQSFLRNNAMSFRRALLRYRDGVEVHLGTRPDEKQYDTVETQLRFMTENGFSLRDGLYAISAVSHFTLGAVLEQQEHTAALTDRPAAPDENLPPLLREALQIMDSDDGEQAFLHGLESLIRGFEVQLTALLQIV

SEQ ID NO: 214 - protein, 208 aa, Artificial
  Modified tetracycline repressor
MSRLDKSKVINSALEQLHVGGIEGLTTRKLAQKLGVEQPTLYWHVKNKRALLDALAVEILARHHDYSLPAAGESWQSFLRNNAMSFRRALLRYRDTAKVHLGTRPDEKQYDTVETQLRFMTENGFSLRDGLYAISAVSHFTLGAVLEQQEHTAALTDRPAAPDENLPPLLREALQIMDSDDGEQAFLHGLESLIRGFEVQLTALLQIV

SEQ ID NO: 215 - protein, 208 aa, Artificial
  Modified tetracycline repressor
MSRLDKSKVINSALELLNEVGIEALTTRKLAQKLGVEQPTLYWHVKNKRALLDALAVEILARHHDYSLPAAGESWQSFLRNNAMSFRRALLRYPEGAKVHLDTRPDEKQYDTVETQLRFMTENGFSLRDGLYAISAVSHFTLGAVLEQQEHTAALTDRPAAPDENLPPLLREALQIMDSDDGEQAFLHGLESLIRGFEVQLTALLQIV

SEQ ID NO: 216 - protein, 208 aa, Artificial
  Modified tetracycline repressor
MSRLDKSKVINSALGLLNEVGIEGLTTRKLAQKLGVEQPTLYWHVKNKRALLDALAVEILARHHDYSLPAAGESWQSFLRNNAMSFRRALLRYRAGAKGHLGTRPDEKQYDTVETQLRFMTENGFSLRDGLYAISAVSHFTLGAVLEQQEHTAALTDRPAAPDENLPPLLREALQIMDSDDGEQAFLHGLESLIRGFEVQLTALLQIV

SEQ ID NO: 217 - protein, 208 aa, Artificial
  Modified tetracycline repressor
MSRLDKSKVINSALDLITEVGIGGLTTRKLAQKLGVEQPTLYWHVKNKRALLDVLAVEILARHHDYSLPAAGESWQSFLRNNAMSFRRALLRYRAGAKVHLGTRPDEKQYDTVETQLRFMTENGFSLRDGLYAISAVSHFTLGAVLEQQEHTAALTDRPAAPDENLPPLLREALQIMDSDDGEQAFLHGLESLIRGFEVQLTALLQIV

SEQ ID NO: 218 - protein, 208 aa, Artificial
  Modified tetracycline repressor
MSRLDKSKVINSAVELLNEVGIEGLTTRKLAQKLGVEQPTLYWHVKNKRALLDALAVEILARHHDYSLPAAGESWQSFLRNNAMSFRRALLRYRDGTKGHLGTRPDEKQYDTVETQLRFMTENGFSLRDGLYAISAVSHFTLGAVLEQQEHTAALTDRPAAPDENLPPLLREALQIMDSDDGEQAFLHGLESLIRGFEVQLTALLQIV

SEQ ID NO: 219 - protein, 208 aa, Artificial
  Modified tetracycline repressor
MSRLDKSKVINSAFELLNEVGIAGLTTRKLAQKLGVEQPTLYWHVKNKRALLDALAVEILARHHDYSLPAAGESWQSFLRNNAMSFRRALLRYRDMPKVHPGTRPDEKQYDTVETQLRFMTENGFSLRDGLYAISAVSHFTLGAVLEQQEHTAALTDRPAAPDENLPPLLREALQIMDSDDGEQAFLHGLESLIRGFEVQLTALLQIV

SEQ ID NO: 220 - protein, 208 aa, Artificial
  Modified tetracycline repressor
MSRLDKSKVINSALERLNDVGIDGLTTRKLAQKLGVEQPTLYWHVKNKRALLDALAVEILARHHDYSLPAAGESWQSFLRNNAMSFRRALLRYRGGAKAHLGTRPDEKQYDTVETQLRFMTENGFSLRDGLYAISAVSHFTLGAVLEQQEHTAALTDRPAAPDENLPPLLREALQIMDSDDGEQAFLHGLESLIRGFEVQLTALLQIV

SEQ ID NO: 221 - protein, 208 aa, Artificial
  Modified tetracycline repressor
MSRLDKSKVINSALELFNEVGIEGLTTRKLAQKLGVEQPTLYWHVKNKRALLDALAVEIFAVHHDYSLPAAGESWQSFLRNNAMSFRRALLRYRDGAKVHLGTRPDEKQYDTVETQLRFMTENGFSLRDGLYAISAVSHFTLGAVLEQQEHTAALTDRPAAPDENLPPLLREALQIMDSDDGEQAFLHGLESLIRGFEVQLTALLQIV

SEQ ID NO: 222 - protein, 208 aa, Artificial
  Modified tetracycline repressor
MSRLDKSKVINSALELLNEGGIEGLTTRKLAQKLGVEQPTLYWHVKNKRALLNALGLEFFARHHDYSLPAAGESWQSFLRNNAMSFRRALLRYRDGAKVHLGTRPDEKQYDTVETQLRFMTENGFSLRDGLYAISAVSHFTLGAVLEQQEHTAALTDRPAAPDENLPPLLREALQIMDSDDGEQAFLHGLESLIRGFEVQLTALLQIV

SEQ ID NO: 223 - protein, 208 aa, Artificial
  Modified tetracycline repressor
MSRLDKSKVINSALELLNGVGIEGLTTRKLAQKLGVEQPTLYWHVKNKRALLYALPVEILERHHDYSLPAAGESWQSFLRNNAMSFRRALLRYRDGAKVHLGTRPDEKQYDTVETQLRFMTENGFSLRDGLYAISAVSHFTLGAVLEQQEHTAALTDRPAAPDENLPPLLREALQIMDSDDGEQAFLHGLESLIRGFEVQLTALLQIV

SEQ ID NO: 224 - protein, 208 aa, Artificial
  Modified tetracycline repressor
MSRLDKSKVINSALELLNEVGIEGLTTRKLAQKLGVEQPTLYWHVKNKRALLDALAVEILARHHDYSLPAAGESWQSFLRNNAMSFRRALLRYPDVTNVQLGTRPDEKQYDTVETQLRFMTENGFSLRDGLYAISAVSHFTLGAVLEQQEHTAALTDRPAAPDENLPPLLREALQIMDSDDGEQAFLHGLESLIRGFEVQLTALLQIV

SEQ ID NO: 225 - protein, 208 aa, Artificial
  Modified tetracycline repressor
MSRLDKSKVINSALEQLYEVGIEGLTTRKLAQKLGVEQPTLYWHVKNKRALLDALAVEILARHHDYSLPAAGESWQSFLRNNAMSFRRALLRYRDGGKVSLGTRPDEKQYDTVETQLRFMTENGFSLRDGLYAISAVSHFTLGAVLEQQEHTAALTDRPAAPDENLPPLLREALQIMDSDDGEQAFLHGLESLIRGFEVQLTALLQIV

SEQ ID NO: 226 - protein, 208 aa, Artificial
  Modified tetracycline repressor
MSRLDKSKVINSALDLLNVVGIKGLTTRKLAQKLGVEQPTLYWHVKNKRALLDALAVEILARHHDYSLPAAGESWQSFLRNNAMSFRRALLRYHNGAKVHLGTRPDEKQYDTVETQLRFMTENGFSLRDGLYAISAVSHFTLGAVLEQQEHTAALTDRPAAPDENLPPLLREALQIMDSDDGEQAFLHGLESLIRGFEVQLTALLQIV

SEQ ID NO: 227 - protein, 208 aa, Artificial
  Modified tetracycline repressor
MSRLDKSKVINSAFELLNEVGIEGLTTRKLAQKLGVEQPTLYWHVKNKRALLDALAVEILARHHDYSLPAAGESWQSFLRNNAMSFRRALLRYRAGAKGHLGTRPDEKQYDTVETQLRFMTENGFSLRDGLYAISAVSHFTLGAVLEQQEHTAALTDRPAAPDENLPPLLREALQIMDSDDGEQAFLHGLESLIRGFEVQLTALLQIV

SEQ ID NO: 228 - protein, 208 aa, Artificial
  Modified tetracycline repressor
MSRLDKSKVINSALGLLKEVGIEGLTTRKLAQKLGVEQPTLYWHVKNKRALLDALAVEILARHHDYSLPAAGESWQSFLRNNAMSFRRALLRYHDGAKVHLVTRPDEKQYDTVETQLRFMTENGFSLRDGLYAISAVSHFTLGAVLEQQEHTAALTDRPAAPDENLPPLLREALQIMDSDDGEQAFLHGLESLIRGFEVQLTALLQIV

SEQ ID NO: 229 - protein, 208 aa, Artificial
  Modified tetracycline repressor
MSRLDKSKVINSAVELFNEAGMEGFTTRKLAQKLGVEQPTLYWHVKNKRALLDALAVEILARHHDYSLPAAGESWQSFLRNNAMSFRRALLRYRHGAKVHLGTRPDEKQYDTVETQLRFMTENGFSLRDGLYAISAVSHFTLGAVLEQQEHTAALTDRPAAPDENLPPLLREALQIMDSDDGEQAFLHGLESLIRGFEVQLTALLQIV

SEQ ID NO: 230 - protein, 208 aa, Artificial
  Modified tetracycline repressor
MSRLDKSKVINSALELLHEVGIEGFTTRKLAQKLGVEQPTLYWHVKNKRALLDALAVEILARHHDYSLPAAGESWQSFLRNNAMSFRRALLRYRDGPNVHHGTRPDEKQYDTVETQLRFMTENGFSLRDGLYAISAVSHFTLGAVLEQQEHTAALTDRPAAPDENLPPLLREALQIMDSDDGEQAFLHGLESLIRGFEVQLTALLQIV

SEQ ID NO: 231 - protein, 208 aa, Artificial
  Modified tetracycline repressor
MSRLDKSKVINSALALLNEVGIEGLTTRKLAQKLGVEQPTLYWHVKNKRALLDALAVEILARHHDYSLPAAGESWQSFLRNNAMSFRRALLRYRDMPKVHPGTRPDEKQYDTVETQLRFMTENGFSLRDGLYAISAVSHFTLGAVLEQQEHTAALTDRPAAPDENLPPLLREALQIMDSDDGEQAFLHGLESLIRGFEVQLTALLQIV

SEQ ID NO: 232 - protein, 208 aa, Artificial
  Modified tetracycline repressor
MSRLDKSKVINSALELLNEVGIEGLTTRKLAQKLGVEQPTLYWHVKNKRALLDALAVEILARHHDYSLPAAGESWQSFLRNNAMSFRRALLRYPDGAKEHLGTRPDEKQYDTVETQLRFMTENGFSLRDGLYAISAVSHFTLGAVLEQQEHTAALTDRPAAPDENLPPLLREALQIMDSDDGEQAFLHGLESLIRGFEVQLTALLQIV

SEQ ID NO: 233 - protein, 208 aa, Artificial
  Modified tetracycline repressor
MSRLDKSKVINSALELLNEVGIEGLTTRKLAQKLGVEQPTLYWHVKNKRALLDALAVEILARHHDYSLPAAGESWQSFLRNNAMSFRRALLRYCDGAKEHLGTRPDEKQYDTVETQLRFMTENGFSLRDGLYAISAVSHFTLGAVLEQQEHTAALTDRPAAPDENLPPLLREALQIMDSDDGEQAFLHGLESLIRGFEVQLTALLQIV

SEQ ID NO: 234 - protein, 208 aa, Artificial
  Modified tetracycline repressor
MSRLDKSKVINSALELLKAVGIEGLTTRKLAQKLGVEQPTLYWHVKNKRALLDALAVEILARHHDYSLPAAGESWQSFLRNNAMSFRRALLRYRDGAKVHLSTRPDEKQYDTVETQLRFMTENGFSLRDGLYAISAVSHFTLGAVLEQQEHTAALTDRPAAPDENLPPLLREALQIMDSDDGEQAFLHGLESLIRGFEVQLTALLQIV

SEQ ID NO: 235 - protein, 208 aa, Artificial
  Modified tetracycline repressor
MSRLDKSKVINSALELLNEGGIEGLTTRKLAQKLGVEQPTLYWHVKNKRALLDALAVEILARHHDYSLPAAGESWQSFLRNNAMSFRRALLRYRDGAKEHLGTRPDEKQYDTVETQLRFMTENGFSLRDGLYAISAVSHFTLGAVLEQQEHTAALTDRPAAPDENLPPLLREALQIMDSDDGEQAFLHGLESLIRGFEVQLTALLQIV

SEQ ID NO: 236 - protein, 208 aa, Artificial
  Modified tetracycline repressor
MSRLDKSKVINSALELLNVAGIEGLTTRKLAQKLGVEQPTLYWHVKNKRALLDALAVEILARHHDYSLPAAGESWQSFLRNNAMSFRRALLRYRIGAKVHLGTRPDEKQYDTVETQLRFMTENGFSLRDGLYAISAVSHFTLGAVLEQQEHTAALTDRPAAPDENLPPLLREALQIMDSDDGEQAFLHGLESLIRGFEVQLTALLQIV

SEQ ID NO: 237 - protein, 208 aa, Artificial
  Modified tetracycline repressor
MSRLDKSKVINSALELLDEVGIAGLTTRKLAQKLGVEQPTLYWHVKNKRALLDALAVEILARHHDYSLPAAGESWQSFLRNNAMSFRRALLRYRNGAKVPSGTRPDEKQYDTVETQLRFMTENGFSLRDGLYAISAVSHFTLGAVLEQQEHTAALTDRPAAPDENLPPLLREALQIMDSDDGEQAFLHGLESLIRGFEVQLTALLQIV

SEQ ID NO: 238 - protein, 208 aa, Artificial; identical to SEQ ID NO: 125
  Modified tetracycline repressor

SEQ ID NO: 239 - protein, 208 aa, Artificial
  Modified tetracycline repressor
MSRLDKSKVINSALELLNEVGIEGLTTRKLAQKLGVEQPTLYWHVKNKRALLDALAVEILARHHDYSLPAAGESWQSFLRNNAMSFRRALLRYRDRPKVHLGTRPDEKQYDTVETQLRFMTENGFSLRDGLYAISAVSHFTLGAVLEQQEHTAALTDRPAAPDENLPPLLREALQIMDSDDGEQAFLHGLESLIRGFEVQLTALLQIV

SEQ ID NO: 240 - protein, 208 aa, Artificial
  Modified tetracycline repressor
MSRLDKSKVINSALELLNEVGVDGLTTRKLAQKLGVEQPTLYWHVKNKRALLDALAVEILARHHDYSLPAAGESWQSFLRNNAMSFRRALLRYRNGAKVPLGTRPDEKQYDTVETQLRFMTENGFSLRDGLYAISAVSHFTLGAVLEQQEHTAALTDRPAAPDENLPPLLREALQIMDSDDGEQAFLHGLESLIRGFEVQLTALLQIV

SEQ ID NO: 241 - protein, 208 aa, Artificial
  Modified tetracycline repressor
MSRLDKSKVINSALELLNEVGIEGLTTRKLAQKLGVEQPTLYWHVKNKRALLDALAVEILARHHDYSLPAAGESWQSFLRNNAMSFRRALLRYRYEAKVHLGTRPDEKQYDTVETQLRFMTENGFSLRDGLYAISAVSHFTLGAVLEQQEHTAALTDRPAAPDENLPPLLREALQIMDSDDGEQAFLHGLESLIRGFEVQLTALLQIV

SEQ ID NO: 242 - protein, 208 aa, Artificial; identical to SEQ ID NO: 125
  Modified tetracycline repressor

SEQ ID NO: 243 - protein, 208 aa, Artificial; identical to SEQ ID NO: 122
  Modified tetracycline repressor

SEQ ID NO: 244 - protein, 208 aa, Artificial
  Modified tetracycline repressor
MSRLDKSKVINSALELLNEVGIEGLTTRKLAQKLGVEQPTLYWHVKNKRALLDALAVEILARHHDYSLPAAGESWQSFLRNNAMSFRRALLRYRDHAKRHLGTRPDEKQYDTVETQLRFMTENGFSLRDGLYAISAVSHFTLGAVLEQQEHTAALTDRPAAPDENLPPLLREALQIMDSDDGEQAFLHGLESLIRGFEVQLTALLQIV

SEQ ID NO: 245 - protein, 208 aa, Artificial
  Modified tetracycline repressor
MSRLDKSKVINSALELLNEVGIEGLTTRKLAQKLGVEQPTLYWHVKNKRALLDALAVEILARHHDYSLPAAGESWQSFLRNNAMSFRRALLRYRDKAKAHLGTRPDEKQYDTVETQLRFMTENGFSLRDGLYAISAVSHFTLGAVLEQQEHTAALTDRPAAPDENLPPLLREALQIMDSDDGEQAFLHGLESLIRGFEVQLTALLQIV

SEQ ID NO: 246 - protein, 208 aa, Artificial
  Modified tetracycline repressor
MSRLDKSKVINSALELLNEVGIEGLTTRKLAQKLGVEQPTLYWHVKNKRALLDALAVEILARHHDYSLPAAGESWQSFLRNNAMSFRRALLRYRDEAKTHLGTRPDEKQYDTVETQLRFMTENGFSLRDGLYAISAVSHFTLGAVLEQQEHTAALTDRPAAPDENLPPLLREALQIMDSDDGEQAFLHGLESLIRGFEVQLTALLQIV

SEQ ID NO: 247 - protein, 208 aa, Artificial
  Modified tetracycline repressor
MSRLDKSKVINSALELLNEVGIEGLTTRKLAQKLGVEQPTLYWHVKNKRALLDALAVEILARHHDYSLPAAGESWQSFLRNNAMSFRRALLRYRDPAKSHLGTRPDEKQYDTVETQLRFMTENGFSLRDGLYAISAVSHFTLGAVLEQQEHTAALTDRPAAPDENLPPLLREALQIMDSDDGEQAFLHGLESLIRGFEVQLTALLQIV

SEQ ID NO: 248 - protein, 208 aa, Artificial
  Modified tetracycline repressor
MSRLDKSKVINSALELLNEVGIEGLTTRKLAQKLGVEQPTLYWHVKNKRALLDALAVEILARHHDYSLPAAGESWQSFLRNNAMSFRRALLRYRDIAKKHLGTRPDEKQYDTVETQLRFMTENGFSLRDGLYAISAVSHFTLGAVLEQQEHTAALTDRPAAPDENLPPLLREALQIMDSDDGEQAFLHGLESLIRGFEVQLTALLQIV

SEQ ID NO: 249 - protein, 208 aa, Artificial
  Modified tetracycline repressor
MSRLDKSKVINSALELLNEVGIEGLTTRKLAQKLGVEQPTLYWHVKNKRALLDALAVEILARHHDYSLPAAGESWQSFLRNNAMSFRRALLRYRDNAKQHLGTRPDEKQYDTVETQLRFMTENGFSLRDGLYAISAVSHFTLGAVLEQQEHTAALTDRPAAPDENLPPLLREALQIMDSDDGEQAFLHGLESLIRGFEVQLTALLQIV

SEQ ID NO: 250 - protein, 208 aa, Artificial
  Modified tetracycline repressor
MSRLDKSKVINSALELLNEVGIEGLTTRKLAQKLGVEQPTLYWHVKNKRALLDALAVEILARHHDYSLPAAGESWQSFLRNNAMSFRRALLRYRDLAKKHLGTRPDEKQYDTVETQLRFMTENGFSLRDGLYAISAVSHFTLGAVLEQQEHTAALTDRPAAPDENLPPLLREALQIMDSDDGEQAFLHGLESLIRGFEVQLTALLQIV

SEQ ID NO: 251 - protein, 208 aa, Artificial
  Modified tetracycline repressor
MSRLDKSKVINSALELLNEVGIEGLTTRKLAQKLGVEQPTLYWHVKNKRALLDALAVEILARHHDYSLPAAGESWQSFLRNNAMSFRRALLRYRDNAKHHLGTRPDEKQYDTVETQLRFMTENGFSLRDGLYAISAVSHFTLGAVLEQQEHTAALTDRPAAPDENLPPLLREALQIMDSDDGEQAFLHGLESLIRGFEVQLTALLQIV

SEQ ID NO: 252 - protein, 208 aa, Artificial
  Modified tetracycline repressor
MSRLDKSKVINSALELLNEVGIEGLTTRKLAQKLGVEQPTLYWHVKNKRALLDALAVEILARHHDYSLPAAGESWQSFLRNNAMSFRRALLRYRDHAKNHLGTRPDEKQYDTVETQLRFMTENGFSLRDGLYAISAVSHFTLGAVLEQQEHTAALTDRPAAPDENLPPLLREALQIMDSDDGEQAFLHGLESLIRGFEVQLTALLQIV

SEQ ID NO: 253 - protein, 208 aa, Artificial
  Modified tetracycline repressor
MSRLDKSKVINSALELLNEVGIEGLTTRKLAQKLGVEQPTLYWHVKNKRALLDALAVEILARHHDYSLPAAGESWQSFLRNNAMSFRRALLRYRDNAKPHLGTRPDEKQYDTVETQLRFMTENGFSLRDGLYAISAVSHFTLGAVLEQQEHTAALTDRPAAPDENLPPLLREALQIMDSDDGEQAFLHGLESLIRGFEVQLTALLQIV

SEQ ID NO: 254 - protein, 208 aa, Artificial
  Modified tetracycline repressor
MSRLDKSKVINSALELLNEVGIEGLTTRKLAQKLGVEQPTLYWHVKNKRALLDALAVEILARHHDYSLPAAGESWQSFLRNNAMSFRRALLRYRDRAKYHLGTRPDEKQYDTVETQLRFMTENGFSLRDGLYAISAVSHFTLGAVLEQQEHTAALTDRPAAPDENLPPLLREALQIMDSDDGEQAFLHGLESLIRGFEVQLTALLQIV

SEQ ID NO: 255 - protein, 208 aa, Artificial
  Modified tetracycline repressor
MSRLDKSKVINSALELLNEVGIEGLTTRKLAQKLGVEQPTLYWHVKNKRALLDALAVEILARHHDYSLPAAGESWQSFLRNNAMSFRRALLRYRDHAKQHLGTRPDEKQYDTVETQLRFMTENGFSLRDGLYAISAVSHFTLGAVLEQQEHTAALTDRPAAPDENLPPLLREALQIMDSDDGEQAFLHGLESLIRGFEVQLTALLQIV

SEQ ID NO: 256 - protein, 208 aa, Artificial
  Modified tetracycline repressor
MSRLDKSKVINSALELLNEVGIEGLTTRKLAQKLGVEQPTLYWHVKNKRALLDALAVEILARHHDYSLPAAGESWQSFLRNNAMSFRRALLRYRDTAKDHLGTRPDEKQYDTVETQLRFMTENGFSLRDGLYAISAVSHFTLGAVLEQQEHTAALTDRPAAPDENLPPLLREALQIMDSDDGEQAFLHGLESLIRGFEVQLTALLQIV

SEQ ID NO: 257 - protein, 208 aa, Artificial
  Modified tetracycline repressor
MSRLDKSKVINSALELLNEVGIEGLTTRKLAQKLGVEQPTLYWHVKNKRALLDALAVEILARHHDYSLPAAGESWQSFLRNNAMSFRRALLRYRDNAKNHLGTRPDEKQYDTVETQLRFMTENGFSLRDGLYAISAVSHFTLGAVLEQQEHTAALTDRPAAPDENLPPLLREALQIMDSDDGEQAFLHGLESLIRGFEVQLTALLQIV

SEQ ID NO: 258 - protein, 208 aa, Artificial
  Modified tetracycline repressor
MSRLDKSKVINSALELLNEVGIEGLTTRKLAQKLGVEQPTLYWHVKNKRALLDALAVEILARHHDYSLPAAGESWQSFLRNNAMSFRRALLRYRDPAKPHLGTRPDEKQYDTVETQLRFMTENGFSLRDGLYAISAVSHFTLGAVLEQQEHTAALTDRPAAPDENLPPLLREALQIMDSDDGEQAFLHGLESLIRGFEVQLTALLQIV

SEQ ID NO: 259 - protein, 208 aa, Artificial
  Modified tetracycline repressor
MSRLDKSKVINSALELLNEVGIEGLTTRKLAQKLGVEQPTLYWHVKNKRALLDALAVEILARHHDYSLPAAGESWQSFLRNNAMSFRRALLRYRDPAKYHLGTRPDEKQYDTVETQLRFMTENGFSLRDGLYAISAVSHFTLGAVLEQQEHTAALTDRPAAPDENLPPLLREALQIMDSDDGEQAFLHGLESLIRGFEVQLTALLQIV

SEQ ID NO: 260 - protein, 208 aa, Artificial
  Modified tetracycline repressor
MSRLDKSKVINSALELLNEVGIEGLTTRKLAQKLGVEQPTLYWHVKNKRALLDALAVEILARHHDYSLPAAGESWQSFLRNNAMSFRRALLRYRDTAKKHLGTRPDEKQYDTVETQLRFMTENGFSLRDGLYAISAVSHFTLGAVLEQQEHTAALTDRPAAPDENLPPLLREALQIMDSDDGEQAFLHGLESLIRGFEVQLTALLQIV

SEQ ID NO: 261 - protein, 208 aa, Artificial
  Modified tetracycline repressor
MSRLDKSKVINSALELLNEVGIEGLTTRKLAQKLGVEQPTLYWHVKNKRALLDALAVEILARHHDYSLPAAGESWQSFLRNNAMSFRRALLRYRDTAKPHLGTRPDEKQYDTVETQLRFMTENGFSLRDGLYAISAVSHFTLGAVLEQQEHTAALTDRPAAPDENLPPLLREALQIMDSDDGEQAFLHGLESLIRGFEVQLTALLQIV

SEQ ID NO: 262 - protein, 208 aa, Artificial
  Modified tetracycline repressor
MSRLDKSKVINSALELLNEVGIEGLTTRKLAQKLGVEQPTLYWHVKNKRALLDALAVEILARHHDYSLPAAGESWQSFLRNNAMSFRRALLRYRDRAKSHLGTRPDEKQYDTVETQLRFMTENGFSLRDGLYAISAVSHFTLGAVLEQQEHTAALTDRPAAPDENLPPLLREALQIMDSDDGEQAFLHGLESLIRGFEVQLTALLQIV

SEQ ID NO: 263 - protein, 208 aa, Artificial
  Modified tetracycline repressor
MSRLDKSKVINSALELLNEVGIEGLTTRKLAQKLGVEQPTLYWHVKNKRALLDALAVEILARHHDYSLPAAGESWQSFLRNNAMSFRRALLRYRDSAKKHLGTRPDEKQYDTVETQLRFMTENGFSLRDGLYAISAVSHFTLGAVLEQQEHTAALTDRPAAPDENLPPLLREALQIMDSDDGEQAFLHGLESLIRGFEVQLTALLQIV

SEQ ID NO: 264 - protein, 208 aa, Artificial
  Modified tetracycline repressor
MSRLDKSKVINSALELLNEVGIEGLTTRKLAQKLGVEQPTLYWHVKNKRALLDALAVEILARHHDYSLPAAGESWQSFLRNNAMSFRRALLRYRDPAKVHLGTRPDEKQYDTVETQLRFMTENGFSLRDGLYAISAVSHFTLGAVLEQQEHTAALTDRPAAPDENLPPLLREALQIMDSDDGEQAFLHGLESLIRGFEVQLTALLQIV

SEQ ID NO: 265 - DNA, 624 bp, Artificial
  Modified tetracycline repressor
atgtctagattagataaaagtaaagtgattaacagcgcattagagctgcttaatgaggtcggaatcgaaggtttaacaacccgtaaactcgcccagaagcttggtgtagagcagcctacattgtattggcatgtaaaaaataagcggtccctactgtttgcgctggggattgagatcttggcgcgtcagcatgattattcactgcctgcggcgggggaatcctggcagtcatttctgcgcaataatgcaatgagtttccgccgcgcgctgctgcgttaccgtgacggggcaaaagtgcacctcggcacgcgtcctgatgaaaaacagtatgatacggtggaaacccagttacgctttatgacagaaaacggcttttcactgcgcgacgggttatatgcgatttcagcggtcagtcattttaccttaggtgccgtactggagcagcaggagcatactgccgccctgaccgaccgccctgcagcaccggacgaaaacctgccgccgctattgcgggaagcgctgcagattatggacagtgatgatggtgagcaggcctttctgcatggcctggagagcctgatccgggggtttgaggtgcagcttacggcactgttgcaaatagtc

SEQ ID NO: 266 - DNA, 624 bp, Artificial
  Modified tetracycline repressor
atgtctagattagataaaagtaaagtgattaacagcgcattagagctgcttaatgaggtcggaatcgaaggtttaacaacccgtaaactcgcccagaagcttggtgtagagcagcctacattgtattggcatgtaaaaaataagcgggccctactggatgcgctggcggtggagaactttgggcgtcatcatgattattcactgcctgcggcgggggaatcctggcagtcatttctgcgcaataatgcaatgagtttccgccgcgcgctgctgcgttaccgtgacggggcaaaagtgcacctcggcacgcgtcctgatgaaaaacagtatgatacggtggaaacccagttacgctttatgacagaaaacggcttttcactgcgcgacgggttatatgcgatttcagcggtcagtcattttaccttaggtgccgtactggagcagcaggagcatactgccgccctgaccgaccgccctgcagcaccggacgaaaacctgccgccgctattgcgggaagcgctgcagattatggacagtgatgatggtgagcaggcctttctgcatggcctggagagcctgatccgggggtttgaggtgcagcttacggcactgttgcaaatagtc

SEQ ID NO: 267 - DNA, 624 bp, Artificial
  Modified tetracycline repressor
atgtctagattagataaaagtaaagtgattaacagcgcattagagctgcttaatgaggtcggaatcgaaggtttaacaacccgtaaactcgcccagaagcttggtgtagagcagcctacattgtattggcatgtaaaaaataagcgggccctactggatgcgcttcctgtggagatcttggcgagtcatcatgattattcactgcctgcggcgggggaatcctggcagtcatttctgcgcaataatgcaatgagtttccgccgcgcgctgctgcgttaccgtgacggggcaaaagtgcacctcggcacgcgtcctgatgaaaaacagtatgatacggtggaaacccagttacgctttatgacagaaaacggcttttcactgcgcgacgggttatatgcgatttcagcggtcagtcattttaccttaggtgccgtactggagcagcaggagcatactgccgccctgaccgaccgccctgcagcaccggacgaaaacctgccgccgctattgcgggaagcgctgcagattatggacagtgatgatggtgagcaggcctttctgcatggcctggagagcctgatccgggggtttgaggtgcagcttacggcactgttgcaaatagtc

SEQ ID NO: 268 - DNA, 624 bp, Artificial
  Modified tetracycline repressor
atgtctagattagataaaagtaaagtgattaacagcgcattagagctgcttaatgaggtcggaatcgaaggtttaacaacccgtaaactcgcccagaagcttggtgtagagcagcctacattgtattggcatgtaaaaaataagcgggccctactggatgcgctggcggtgaataccttcgcgcgttatcatgattattcactgcctgcggcgggggaatcctggcagtcatttctgcgcaataatgcaatgagtttccgccgcgcgctgctgcgttaccgtgacggggcaaaagtgcacctcggcacgcgtcctgatgaaaaacagtatgatacggtggaaacccagttacgctttatgacagaaaacggcttttcactgcgcgacgggttatatgcgatttcagcggtcagtcattttaccttaggtgccgtactggagcagcaggagcatactgccgccctgaccgaccgccctgcagcaccggacgaaaacctgccgccgctattgcgggaagcgctgcagattatggacagtgatgatggtgagcaggcctttctgcatggcctggagagcctgatccgggggtttgaggtgcagcttacggcactgttgcaaatagtc

SEQ ID NO: 269 - DNA, 624 bp, Artificial
  Modified tetracycline repressor
atgtctagattagataaaagtaaagtgattaacagcgcattagagctgcttaatgaggtcggaatcgaaggtttaacaacccgtaaactcgcccagaagcttggtgtagagcagcctacattgtattggcatgtaaaaaataagcgggccctcctgcaagcgctggcggttaagatcttggtgcctgaccatgattattcactgcctgcggcgggggaatcctggcagtcatttctgcgcaataatgcaatgagtttccgccgcgcgctgctgcgttaccgtgacggggcaaaagtgcacctcggcacgcgtcctgatgaaaaacagtatgatacggtggaaacccagttacgctttatgacagaaaacggcttttcactgcgcgacgggttatatgcgatttcagcggtcagtcattttaccttaggtgccgtactggagcagcaggagcatactgccgccctgaccgaccgccctgcagcaccggacgaaaacctgccgccgctattgcgggaagcgctgcagattatggacagtgatgatggtgagcaggcctttctgcatggcctggagagcctgatccgggggtttgaggtgcagcttacggcactgttgcaaatagtc

SEQ ID NO: 270 - DNA, 624 bp, Artificial
  Modified tetracycline repressor
atgtctagattagataaaagtaaagtgattaacagcgcattagagctgcttaatgaggtcggaatcgaaggtttaacaacccgtaaactcgcccagaagcttggtgtagagcagcctacattgtattggcatgtaaaaaataagcgggccctactgaacgggctggcgtttgagagctttgcgcgtcatcatgattattcactgcctgcggcgggggaatcctggcagtcatttctgcgcaataatgcaatgagtttccgccgcgcgctgctgcgttaccgtgacggggcaaaagtgcacctcggcacgcgtcctgatgaaaaacagtatgatacggtggaaacccagttacgctttatgacagaaaacggcttttcactgcgcgacgggttatatgcgatttcagcggtcagtcattttaccttaggtgccgtactggagcagcaggagcatactgccgccctgaccgaccgccctgcagcaccggacgaaaacctgccgccgctattgcgggaagcgctgcagattatggacagtgatgatggtgagcaggcctttctgcatggcctggagagcctgatccgggggtttgaggtgcagcttacggcactgttgcaaatagtc

SEQ ID NO: 271 - DNA, 624 bp, Artificial
  Modified tetracycline repressor
atgtctagattagataaaagtaaagtgattaacagcgcattagagctgcttaatgaggtcggaatcgaaggtttaacaacccgtaaactcgcccagaagcttggtgtagagcagcctacattgtattggcatgtaaaaaataagcgggccctaatggatgcgctgccgttggtgatcttggcgcgtcatcatgattattcactgcctgcggcgggggaatcctggcagtcatttctgcgcaataatgcaatgagtttccgccgcgcgctgctgcgttaccgtgacggggcaaaagtgcacctcggcacgcgtcctgatgaaaaacagtatgatacggtggaaacccagttacgctttatgacagaaaacggcttttcactgcgcgacgggttatatgcgatttcagcggtcagtcattttaccttaggtgccgtactggagcagcaggagcatactgccgccctgaccgaccgccctgcagcaccggacgaaaacctgccgccgctattgcgggaagcgctgcagattatggacagtgatgatggtgagcaggcctttctgcatggcctggagagcctgatccgggggtttgaggtgcagcttacggcactgttgcaaatagtc

SEQ ID NO: 272 - DNA, 624 bp, Artificial; identical to SEQ ID NO: 268
  Modified tetracycline repressor

SEQ ID NO: 273 - DNA, 624 bp, Artificial
  Modified tetracycline repressor
atgtctagattagataaaagtaaagtgattaacagcgcattagagctgcttaatgaggtcggaatcgaaggtttaacaacccgtaaactcgcccagaagcttggtgtagagcagcctacattgtattggcatgtaaaaaataagcatgccctactggatgcgctgcctctggagatcatggcgcgtcaacatgattattcactgcctgcggcgggggaatcctggcagtcatttctgcgcaataatgcaatgagtttccgccgcgcgctgctgcgttaccgtgacggggcaaaagtgcacctcggcacgcgtcctgatgaaaaacagtatgatacggtggaaacccagttacgctttatgacagaaaacggcttttcactgcgcgacgggttatatgcgatttcagcggtcagtcattttaccttaggtgccgtactggagcagcaggagcatactgccgccctgaccgaccgccctgcagcaccggacgaaaacctgccgccgctattgcgggaagcgctgcagattatggacagtgatgatggtgagcaggcctttctgcatggcctggagagcctgatccgggggtttgaggtgcagcttacggcactgttgcaaatagtc

SEQ ID NO: 274 - DNA, 624 bp, Artificial
  Modified tetracycline repressor
atgtctagattagataaaagtaaagtgattaacagcgcattagagctgcttaatgaggtcggaatcgaaggtttaacaacccgtaaactcgcccagaagcttggtgtagagcagcctacattgtattggcatgtaaaaaataagggcgccctactggatgcgttggcggttaacatcttggcgcttcaacatgattattcactgcctgcggcgggggaatcctggcagtcatttctgcgcaataatgcaatgagtttccgccgcgcgctgctgcgttaccgtgacggggcaaaagtgcacctcggcacgcgtcctgatgaaaaacagtatgatacggtggaaacccagttacgctttatgacagaaaacggcttttcactgcgcgacgggttatatgcgatttcagcggtcagtcattttaccttaggtgccgtactggagcagcaggagcatactgccgccctgaccgaccgccctgcagcaccggacgaaaacctgccgccgctattgcgggaagcgctgcagattatggacagtgatgatggtgagcaggcctttctgcatggcctggagagcctgatccgggggtttgaggtgcagcttacggcactgttgcaaatagtc

SEQ ID NO: 275 - DNA, 624 bp, Artificial
  Modified tetracycline repressor
atgtctagattagataaaagtaaagtgattaacagcgcattagagctgcttaatgaggtcggaatcgaaggtttaacaacccgtaaactcgcccagaagcttggtgtagagcagcctacattgtattggcatgtaaaaaataagcgggccctactggatgcgctggcggttaagatcgttacgggtcatcatgattattcactgcctgcggcgggggaatcctggcagtcatttctgcgcaataatgcaatgagtttccgccgcgcgctgctgcgttaccgtgacggggcaaaagtgcacctcggcacgcgtcctgatgaaaaacagtatgatacggtggaaacccagttacgctttatgacagaaaacggcttttcactgcgcgacgggttatatgcgatttcagcggtcagtcattttaccttaggtgccgtactggagcagcaggagcatactgccgccctgaccgaccgccctgcagcaccggacgaaaacctgccgccgctattgcgggaagcgctgcagattatggacagtgatgatggtgagcaggcctttctgcatggcctggagagcctgatccgggggtttgaggtgcagcttacggcactgttgcaaatagtc

SEQ ID NO: 276 - DNA, 624 bp, Artificial
  Modified tetracycline repressor
atgtctagattagataagagtaaagtgattaacagcgcattagagctgcttaatgaggtcggaatcgaaggtttaacaacccgtaaactcgcccagaagcttggtgtagagcagcctacattgtattggcatgtaaaaaataagcgggccctactgtttgcgcttgcgctggagagcttgtcgcgtcatcatgattattcactgcctgcggcgggggaatcctggcagtcatttctgcgcaataatgcaatgagtttccgccgcgcgctgctgcgttaccgtgacggggcaaaagtgcacctcggcacgcgtcctgatgaaaaacagtatgatacggtggaaacccagttacgctttatgacagaaaacggcttttcactgcgcgacgggttatatgcgatttcagcggtcagtcattttaccttaggtgccgtactggagcagcaggagcatactgccgccctgaccgaccgccctgcagcaccggacgaaaacctgccgccgctattgcgggaagcgctgcagattatggacagtgatgatggtgagcaggcctttctgcatggcctggagagcctgatccgggggtttgaggtgcagcttacggcactgttgcaaatagtc

SEQ ID NO: 277 - DNA, 624 bp, Artificial
  Modified tetracycline repressor
atgtctagattagataaaagtaaagtgattaacagcgcattagagctgcttaatgaggtcggaatcgaaggtttaacaacccgtaaactcgcccagaagcttggtgtagagcagcctacattgtattggcatgtaaaaaataagcatgccctactggatgcgctgcctctggagatcatggcgcgtcatcatgattattcactgcctgcggcgggggaatcctggcagtcatttctgcgcaataatgcaatgagtttccgccgcgcgctgctgcgttaccgtgacggggcaaaagtgcacctcggcacgcgtcctgatgaaaaacagtatgatacggtggaaacccagttacgctttatgacagaaaacggcttttcactgcgcgacgggttatatgcgatttcagcggtcagtcattttaccttaggtgccgtactggagcagcaggagcatactgccgccctgaccgaccgccctgcagcaccggacgaaaacctgccgccgctattgcgggaagcgctgcagattatggacagtgatgatggtgagcaggcctttctgcatggcctggagagcctgatccgggggtttgaggtgcagcttacggcactgttgcaaatagtc

SEQ ID NO: 278 - DNA, 624 bp, Artificial
  Modified tetracycline repressor
atgtctagattagataaaagtaaagtgattaacagcgcattagagctgcttaatgaggtcggaatcgaaggtttaacaacccgtaaactcgcccagaagcttggtgtagagcagcctacattgtattggcatgtaaaaaataagcgggacgtacaggatgctcttgcggtggagatcttgtcgcgtcatcatgattattcactgcctgcggcgggggaatcctggcagtcatttctgcgcaataatgcaatgagtttccgccgcgcgctgctgcgttaccgtgacggggcaaaagtgcacctcggcacgcgtcctgatgaaaaacagtatgatacggtggaaacccagttacgctttatgacagaaaacggcttttcactgcgcgacgggttatatgcgatttcagcggtcagtcattttaccttaggtgccgtactggagcagcaggagcatactgccgccctgaccgaccgccctgcagcaccggacgaaaacctgccgccgctattgcgggaagcgctgcagattatggacagtgatgatggtgagcaggcctttctgcatggcctggagagcctgatccgggggtttgaggtgcagcttacggcactgttgcaaatagtc

SEQ ID NO: 279 - DNA, 624 bp, Artificial
  Modified tetracycline repressor
atgtctagattagataaaagtaaagtgattaacagcgcattagagctgcttaatgaggtcggaatcgaaggtttaacaacccgtaaactcgcccagaagcttggtgtagagcagcctacattgtattggcatgtaaaaaataagcgggccctactggatgcgctggtggcgcagatcttggcgcgtcaacatgattattcactgcctgcggcgggggaatcctggcagtcatttctgcgcaataatgcaatgagtttccgccgcgcgctgctgcgttaccgtgacggggcaaaagtgcacctcggcacgcgtcctgatgaaaaacagtatgatacggtggaaacccagttacgctttatgacagaaaacggcttttcactgcgcgacgggttatatgcgatttcagcggtcagtcattttaccttaggtgccgtactggagcagcaggagcatactgccgccctgaccgaccgccctgcagcaccggacgaaaacctgccgccgctattgcgggaagcgctgcagattatggacagtgatgatggtgagcaggcctttctgcatggcctggagagcctgatccgggggtttgaggtgcagcttacggcactgttgcaaatagtc

SEQ ID NO: 280 - DNA, 624 bp, Artificial
  Modified tetracycline repressor
atgtctagattagataaaagtaaagtgattaacagcgcattagagctgcttaatgaggtcggaatcgaaggtttaacaacccgtaaactcgcccagaagcttggtgtagagcagcctacattgtattggcatgtaaaaaataaacgggccctactggatgcgctggcgttggtgacctttgcgagtcatcatgattattcactgcctgcggcgggggaatcctggcagtcatttctgcgcaataatgcaatgagtttccgccgcgcgctgctgcgttaccgtgacggggcaaaagtgcacctcggcacgcgtcctgatgaaaaacagtatgatacggtggaaacccagttacgctttatgacagaaaacggcttttcactgcgcgacgggttatatgcgatttcagcggtcagtcattttaccttaggtgccgtactggagcagcaggagcatactgccgccctgaccgaccgccctgcagcaccggacgaaaacctgccgccgctattgcgggaagcgctgcagattatggacagtgatgatggtgagcaggcctttctgcatggcctggagagcctgatccgggggtttgaggtgcagcttacggcactgttgcaaatagtc

SEQ ID NO: 281 - DNA, 624 bp, Artificial
  Modified tetracycline repressor
atgtctagattagataaaagtaaagtgattaacagcgcattagagctgcttaatgaggtcggaatcgaaggtttaacaacccgtaaactcgcccagaagcttggtgtagagcagcctacattgtattggcatgtaaaaaataagcgggccctactggatgcgctggcggtcaagatcgttgcgggtcatcatgattattcactgcctgcggcgggggaatcctggcagtcatttctgcgcaataatgcaatgagtttccgccgcgcgctgctgcgttaccgtgacggggcaaaagtgcacctcggcacgcgtcctgatgaaaaacagtatgatacggtggaaacccagttacgctttatgacagaaaacggcttttcactgcgcgacgggttatatgcgatttcagcggtcagtcattttaccttaggtgccgtactggagcagcaggagcatactgccgccctgaccgaccgccctgcagcaccggacgaaaacctgccgccgctattgcgggaagcgctgcagattatggacagtgatgatggtgagcaggcctttctgcatggcctggagagcctgatccgggggtttgaggtgcagcttacggcactgttgcaaatagtc

SEQ ID NO: 282 - DNA, 624 bp, Artificial; identical to SEQ ID NO: 268
  Modified tetracycline repressor

SEQ ID NO: 283 - DNA, 624 bp, Artificial
  Modified tetracycline repressor
atgtctagattagataaaagtaaagtgattaacagcgcattagagctgcttaatgaggtcggaatcgaaggtttaacaacccgtaaactcgcccagaagcttggtgtagagcagcctacattgtattggcatgtaaaaaataagcgggccctactggagtcgctggcggtggagatgttgccccgtcatcatgattattcactgcctgcggcgggggaatcctggcagtcatttctgcgcaataatgcaatgagtttccgccgcgcgctgctgcgttaccgtgacggggcaaaagtgcacctcggcacgcgtcctgatgaaaaacagtatgatacggtggaaacccagttacgctttatgacagaaaacggcttttcactgcgcgacgggttatatgcgatttcagcggtcagtcattttaccttaggtgccgtactggagcagcaggagcatactgccgccctgaccgaccgccctgcagcaccggacgaaaacctgccgccgctattgcgggaagcgctgcagattatggacagtgatgatggtgagcaggcctttctgcatggcctggagagcctgatccgggggtttgaggtgcagcttacggcactgttgcaaatagtc

SEQ ID NO: 284 - DNA, 624 bp, Artificial
  Modified tetracycline repressor
atgtctagattagataaaagtaaagtgattaacagcgcattagagctgcttaatgaggtcggaatcgaaggtttaacaacccgtaaactcgcccagaagcttggtgtagagcagcctacattgtattggcatgtaaaaaataagcggtccctactgtatgcgctggggattgagatcttggcgcgtcagcatgattattcactgcctgcggcgggggaatcctggcagtcatttctgcgcaataatgcaatgagtttccgccgcgcgctgctgcgttaccgtgacggggcaaaagtgcacctcggcacgcgtcctgatgaaaaacagtatgatacggtggaaacccagttacgctttatgacagaaaacggcttttcactgcgcgacgggttatatgcgatttcagcggtcagtcattttaccttaggtgccgtactggagcagcaggagcatactgccgccctgaccgaccgccctgcagcaccggacgaaaacctgccgccgctattgcgggaagcgctgcagattatggacagtgatgatggtgagcaggcctttctgcatggcctggagagcctgatccgggggtttgaggtgcagcttacggcactgttgcaaatagtc

SEQ ID NO: 285 - DNA, 624 bp, Artificial
  Modified tetracycline repressor
atgtctagattagataaaagtaaagtgattaacagcgcattagagctgcttaatgaggtcggaatcgaaggtttaacaacccgtaaactcgcccagaagcttggtgtagagcagcctacattgtattggcatgtaaaaaataagcgtgccctacttgaatctctcgcggtggagatcttgccgcgtcatcatgattattcactgcctgcggcgggggaatcctggcagtcatttctgcgcaataatgcaatgagtttccgccgcgcgctgctgcgttaccgtgacggggcaaaagtgcacctcggcacgcgtcctgatgaaaaacagtatgatacggtggaaacccagttacgctttatgacagaaaacggcttttcactgcgcgacgggttatatgcgatttcagcggtcagtcattttaccttaggtgccgtactggagcagcaggagcatactgccgccctgaccgaccgccctgcagcaccggacgaaaacctgccgccgctattgcgggaagcgctgcagattatggacagtgatgatggtgagcaggcctttctgcatggcctggagagcctgatccgggggtttgaggtgcagcttacggcactgttgcaaatagtc

SEQ ID NO: 286 - DNA, 624 bp, Artificial
  Modified tetracycline repressor
atgtctagattagataaaagtaaagtgattaacagcgcattagagctgcttaatgaggtcggaatcgaaggtttaacaacccgtaaactcgcccagaagcttggtgtagagcagcctacattgtattggcatgtaaaaaataagcgggccctactggatgcgctggcggtggagagcttggcgagccatcatgattattcactgcctgcggcgggggaatcctggcagtcatttctgcgcaataatgcaatgagtttccgccgcgcgctgctgcgttaccgtgacggggcaaaagtgcacctcggcacgcgtcctgatgaaaaacagtatgatacggtggaaacccagttacgctttatgacagaaaacggcttttcactgcgcgacgggttatatgcgatttcagcggtcagtcattttaccttaggtgccgtactggagcagcaggagcatactgccgccctgaccgaccgccctgcagcaccggacgaaaacctgccgccgctattgcgggaagcgctgcagattatggacagtgatgatggtgagcaggcctttctgcatggcctggagagcctgatccgggggtttgaggtgcagcttacggcactgttgcaaatagtc

SEQ ID NO: 287 - DNA, 624 bp, Artificial
  Modified tetracycline repressor
atgtctagattagataaaagtaaagtgattaacagcgcattagagctgcttaatgaggtcggaatcgaaggtttaacaacccgtaaactcgcccagaagcttggtgtagagcagcctacattgtattggcatgtaaaaaataagcgggccctactggatgcgctgcccgtggagatcctcgggcgccatcatgattattcactgcctgcggcgggggaatcctggcagtcatttctgcgcaataatgcaatgagtttccgccgcgcgctgctgcgttaccgtgacggggcaaaagtgcacctcggcacgcgtcctgatgaaaaacagtatgatacggtggaaacccagttacgctttatgacagaaaacggcttttcactgcgcgacgggttatatgcgatttcagcggtcagtcattttaccttaggtgccgtactggagcagcaggagcatactgccgccctgaccgaccgccctgcagcaccggacgaaaacctgccgccgctattgcgggaagcgctgcagattatggacagtgatgatggtgagcaggcctttctgcatggcctggagagcctgatccgggggtttgaggtgcagcttacggcactgttgcaaatagtc

SEQ ID NO: 288 - DNA, 624 bp, Artificial
  Modified tetracycline repressor
atgtctagattagataaaagtaaagtgattaacagcgcattagagctgcttaatgaggtcggaatcgaaggtttaacaacccgtaaactcgcccagaagcttggtgtagagcagcctacattgtattggcatgtaaaaaataagcgggccctagtggatgcgctggtgttggagaccttgtcgcgtcatcatgattattcactgcctgcggcgggggaatcctggcagtcatttctgcgcaataatgcaatgagtttccgccgcgcgctgctgcgttaccgtgacggggcaaaagtgcacctcggcacgcgtcctgatgaaaaacagtatgatacggtggaaacccagttacgctttatgacagaaaacggcttttcactgcgcgacgggttatatgcgatttcagcggtcagtcattttaccttaggtgccgtactggagcagcaggagcatactgccgccctgaccgaccgccctgcagcaccggacgaaaacctgccgccgctattgcgggaagcgctgcagattatggacagtgatgatggtgagcaggcctttctgcatggcctggagagcctgatccgggggtttgaggtgcagcttacggcactgttgcaaatagtc

SEQ ID NO: 289 - DNA, 624 bp, Artificial
  Modified tetracycline repressor
atgtctagattagataaaagtaaagtgattaacagcgcattagagctgcttaatgaggtcggaatcgaaggtttaacaacccgtaaactcgcccagaagcttggtgtagagcagcctacattgtattggcatgtaaaaaataagcgggccctactgtatgcgatgtgcgtggagatcttcgctcgtaatcatgattattcactgcctgcggcgggggaatcctggcagtcatttctgcgcaataatgcaatgagtttccgccgcgcgctgctgcgttaccgtgacggggcaaaagtgcacctcggcacgcgtcctgatgaaaaacagtatgatacggtggaaacccagttacgctttatgacagaaaacggcttttcactgcgcgacgggttatatgcgatttcagcggtcagtcattttaccttaggtgccgtactggagcagcaggagcatactgccgccctgaccgaccgccctgcagcaccggacgaaaacctgccgccgctattgcgggaagcgctgcagattatggacagtgatgatggtgagcaggcctttctgcatggcctggagagcctgatccgggggtttgaggtgcagcttacggcactgttgcaaatagtc

SEQ ID NO: 290 - DNA, 624 bp, Artificial
  Modified tetracycline repressor
atgtctagattagataaaagtaaagtgattaacagcgcattagagctgcttaatgaggtcggaatcgaaggtttaacaacccgtaaactcgcccagaagcttggtgtagagcagcctacattgtattggcatgtaaaaaataagcgggccctcctggatgcgctggcggtggcggacttggcgcgttaccatgattattcactgcctgcggcgggggaatcctggcagtcatttctgcgcaataatgcaatgagtttccgccgcgcgctgctgcgttaccgtgacggggcaaaagtgcacctcggcacgcgtcctgatgaaaaacagtatgatacggtggaaacccagttacgctttatgacagaaaacggcttttcactgcgcgacgggttatatgcgatttcagcggtcagtcattttaccttaggtgccgtactggagcagcaggagcatactgccgccctgaccgaccgccctgcagcaccggacgaaaacctgccgccgctattgcgggaagcgctgcagattatggacagtgatgatggtgagcaggcctttctgcatggcctggagagcctgatccgggggtttgaggtgcagcttacggcactgttgcaaatagtc

SEQ ID NO: 291 - DNA, 624 bp, Artificial
  Modified tetracycline repressor
atgtctagattagataaaagtaaagtgattaacagcgcattagagctgcttaatgaggtcggaatcgaaggtttaacaacccgtaaactcgcccagaagcttggtgtagagcagcctacattgtattggcatgtaaaaaataagcgggccctactgaattcgctcccgccggagatcttggctctccatcatgattattcactgcctgcggcgggggaatcctggcagtcatttctgcgcaataatgcaatgagtttccgccgcgcgctgctgcgttaccgtgacggggcaaaagtgcacctcggcacgcgtcctgatgaaaaacagtatgatacggtggaaacccagttacgctttatgacagaaaacggcttttcactgcgcgacgggttatatgcgatttcagcggtcagtcattttaccttaggtgccgtactggagcagcaggagcatactgccgccctgaccgaccgccctgcagcaccggacgaaaacctgccgccgctattgcgggaagcgctgcagattatggacagtgatgatggtgagcaggcctttctgcatggcctggagagcctgatccgggggtttgaggtgcagcttacggcactgttgcaaatagtc

SEQ ID NO: 292 - DNA, 624 bp, Artificial
  Modified tetracycline repressor
atgtctagattagataaaagtaaagtgattaacagcgcattagagctgcttaatgaggtcggaatcgaaggtttaacaacccgtaaactcgcccagaagcttggtgtagagcagcctacattgtattggcatgtaaaaaataagcgggccctactggatgcgctggcggtggagtttttgtcgcgtcatcaagattattcactgcctgcggcgggggaatcctggcagtcatttctgcgcaataatgcaatgagtttccgccgcgcgctgctgcgttaccgtgacgggacaaaagtgcacctcggcacgcgtcctgatgaaaaacagtatgatacggtggaaacccagttacgctttatgacagaaaacggcttttcactgcgcgacgggttatatgcgatttcagcggtcagtcattttaccttaggtgccgtactggagcagcaggagcatactgccgccctgaccgaccgccctgcagcaccggacgaaaacctgccgccgctattgcgggaagcgctgcagattatggacagtgatgatggtgagcaggcctttctgcatggcctggagagcctgatccgggggtttgaggtgcagcttacggcactgttgcaaatagtc

SEQ ID NO: 293 - DNA, 624 bp, Artificial
  Modified tetracycline repressor
atgtctagattagataaaagtaaagtgattaacagcgcattagagctgcttaatgaggtcggaatcgaaggtttaacaacccgtaaactcgcccagaagcttggtgtagagcagcctacattgtattggcatgtaaaaaataagcgggccctactgtttacgatggcggtggagagcttggcgcgtcaacatgattattcactgcctgcggcgggggaatcctggcagtcatttctgcgcaataatgcaatgagtttccgccgcgcgctgctgcgttaccgtgacggggcaaaagtgcacctcggcacgcgtcctgatgaaaaacagtatgatacggtggaaacccagttacgctttatgacagaaaacggcttttcactgcgcgacgggttatatgcgatttcagcggtcagtcattttaccttaggtgccgtactggagcagcaggagcatactgccgccctgaccgaccgccctgcagcaccggacgaaaacctgccgccgctattgcgggaagcgctgcagattatggacagtgatgatggtgagcaggcctttctgcatggcctggagagcctgatccgggggtttgaggtgcagcttacggcactgttgcaaatagtc

SEQ ID NO: 294 - DNA, 624 bp, Artificial
  Modified tetracycline repressor
atgtctagattagataaaagtaaagtgattaacagcgcattagagctgcttaatgaggtcggaatcgaaggtttaacaacccgtaaactcgcccagaagcttggtgtagagcagcctacattgtattggcatgtaaaaaataagcgggccctactgtttgcgatggcggtggagagcttggcgcgtcaacatgattattcactgcctgcggcgggggaatcctggcagtcatttctgcgcaataatgcaatgagtttccgccgcgcgctgctgcgttaccgtgacggggcaaaagtgcacctcggcacgcgtcctgatgaaaaacagtatgatacggtggaaacccagttacgctttatgacagaaaacggcttttcactgcgcgacgggttatatgcgatttcagcggtcagtcattttaccttaggtgccgtactggagcagcaggagcatactgccgccctgaccgaccgccctgcagcaccggacgaaaacctgccgccgctattgcgggaagcgctgcagattatggacagtgatgatggtgagcaggcctttctgcatggcctggagagcctgatccgggggtttgaggtgcagcttacggcactgttgcaaatagtc

SEQ ID NO: 295 - DNA, 624 bp, Artificial
  Modified tetracycline repressor
atgtctagattagataaaagtaaagtgattaacagcgcattagagctgcttaatgaggtcggaatcgaaggtttaacaacccgtaaactcgcccagaagcttggtgtagagcagcctacattgtattggcatgtaaaaaataagcgggccctactgtatgcgatgtgcgtggagatcttcgcgcgtaatcatgattattcactgcctgcggcgggggaatcctggcagtcatttctgcgcaataatgcaatgagtttccgccgcgcgctgctgcgttaccgtgacggggcaaaagtgcacctcggcacgcgtcctgatgaaaaacagtatgatacggtggaaacccagttacgctttatgacagaaaacggcttttcactgcgcgacgggttatatgcgatttcagcggtcagtcattttaccttaggtgccgtactggagcagcaggagcatactgccgccctgaccgaccgccctgcagcaccggacgaaaacctgccgccgctattgcgggaagcgctgcagattatggacagtgatgatggtgagcaggcctttctgcatggcctggagagcctgatccgggggtttgaggtgcagcttacggcactgttgcaaatagtc

SEQ ID NO: 296 - DNA, 624 bp, Artificial
  Modified tetracycline repressor
atgtctagattagataaaagtaaagtgattaacagcgcattagagctgcttaatgaggtcggaatcgaaggtttaacaacccgtaaactcgcccagaagcttggtgtagagcagcctacattgtattggcatgtaaaaaataagcgggccctactgtatgcgttgccggtggagatcttggcgcttcatcatgattattcactgcctgcggcgggggaatcctggcagtcatttctgcgcaataatgcaatgagtttccgccgcgcgctgctgcgttaccgtgacggggcaaaagtgcacctcggcacgcgtcctgatgaaaaacagtatgatacggtggaaacccagttacgctttatgacagaaaacggcttttcactgcgcgacgggttatatgcgatttcagcggtcagtcattttaccttaggtgccgtactggagcagcaggagcatactgccgccctgaccgaccgccctgcagcaccggacgaaaacctgccgccgctattgcgggaagcgctgcagattatggacagtgatgatggtgagcaggcctttctgcatggcctggagagcctgatccgggggtttgaggtgcagcttacggcactgttgcaaatagtc

SEQ ID NO: 297 - DNA, 624 bp, Artificial
  Modified tetracycline repressor
atgtctagattagataaaagtaaagtgattaacagcgcattagagctgcttaatgaggtcggaatcgaaggtttaacaacccgtaaactcgcccagaagcttggtgtagagcagcctacattgtattggcatgtaaaaaataagcgggcccttctggatgcgctggtggtggagcacttggcgcttcatcatgattattcactgcctgcggcgggggaatcctggcagtcatttctgcgcaataatgcaatgagtttccgccgcgcgctgctgcgttaccgtgacggggcaaaagtgcacctcggcacgcgtcctgatgaaaaacagtatgatacggtggaaacccagttacgctttatgacagaaaacggcttttcactgcgcgacgggttatatgcgatttcagcggtcagtcattttaccttaggtgccgtactggagcagcaggagcatactgccgccctgaccgaccgccctgcagcaccggacgaaaacctgccgccgctattgcgggaagcgctgcagattatggacagtgatgatggtgagcaggcctttctgcatggcctggagagcctgatccgggggtttgaggtgcagcttacggcactgttgcaaatagtc

SEQ ID NO: 298 - DNA, 624 bp, Artificial
  Modified tetracycline repressor
atgtctagattagataaaagtaaagtgattaacagcgcattagagctgcttaatgaggtcggaatcgaaggtttaacaacccgtaaactcgcccagaagcttggtgtagagcagcctacattgtattggcatgtaaaaaataaacgggccctactgtatgcgctgggggtggggatcttggcgcgtcatcatgattattcactgcctgcggcgggggaatcctggcagtcatttctgcgcaataatgcaatgagtttccgccgcgcgctgctgcgttaccgtgacggggcaaaagtgcacctcggcacgcgtcctgatgaaaaacagtatgatacggtggaaacccagttacgctttatgacagaaaacggcttttcactgcgcgacgggttatatgcgatttcagcggtcagtcattttaccttaggtgccgtactggagcagcaggagcatactgccgccctgaccgaccgccctgcagcaccggacgaaaacctgccgccgctattgcgggaagcgctgcagattatggacagtgatgatggtgagcaggcctttctgcatggcctggagagcctgatccgggggtttgaggtgcagcttacggcactgttgcaaatagtc

SEQ ID NO: 299 - DNA, 624 bp, Artificial
  Modified tetracycline repressor
atgtctagattagataaaagtaaagtgattaacagcgcattagagctgcttaatgaggtcggaatcgaaggtttaacaacccgtaaactcgcccagaagcttggtgtagagcagcctacattgtattggcatgtaaaaaataagcgggccctactggatgcgcttgcggtggagaggttggagcgtcataatgattattcactgcctgcggcgggggaatcctggcagtcatttctgcgcaataatgcaatgagtttccgccgcgcgctgctgcgttaccgtgacggggcaaaagtgcacctcggcacgcgtcctgatgaaaaacagtatgatacggtggaaacccagttacgctttatgacagaaaacggcttttcactgcgcgacgggttatatgcgatttcagcggtcagtcattttaccttaggtgccgtactggagcagcaggagcatactgccgccctgaccgaccgccctgcagcaccggacgaaaacctgccgccgctattgcgggaagcgctgcagattatggacagtgatgatggtgagcaggcctttctgcatggcctggagagcctgatccgggggtttgaggtgcagcttacggcactgttgcaaatagtc

SEQ ID NO: 300 - DNA, 624 bp, Artificial
  Modified tetracycline repressor
atgtctagattagataaaagtaaagtgattaacagcgcattagagctgcttaatgaggtcggaatcgaaggtttaacaacccgtaaactcgcccagaagcttggtgtagagcagcctacattgtattggcatgtaaaaaataagcgggccctactggctgcgctggcggtggagatcttgccgcgtcatcatgattattcactgcctgcggcgggggaatcctggcagtcatttctgcgcaataatgcaatgagtttccgccgcgcgctgctgcgttaccgtgacggggcaaaagtgcacctcggcacgcgtcctgatgaaaaacagtatgatacggtggaaacccagttacgctttatgacagaaaacggcttttcactgcgcgacgggttatatgcgatttcagcggtcagtcattttaccttaggtgccgtactggagcagcaggagcatactgccgccctgaccgaccgccctgcagcaccggacgaaaacctgccgccgctattgcgggaagcgctgcagattatggacagtgatgatggtgagcaggcctttctgcatggcctggagagcctgatccgggggtttgaggtgcagcttacggcactgttgcaaatagtc

SEQ ID NO: 301 - DNA, 624 bp, Artificial
  Modified tetracycline repressor
atgtctagattagataaaagtaaagtgattaacagcgcattagagctgcttaatgaggtcggaatcgaaggtttaacaacccgtaaactcgcccagaagcttggtgtagagcagcctacattgtattggcatgtaaaaaataagcgggccctactgaccgcgatgccggtggagatcttgtcgcgtcatcatgattattcactgcctgcggcgggggaatcctggcagtcatttctgcgcaataatgcaatgagtttccgccgcgcgctgctgcgttaccgtgacggggcaaaagtgcacctcggcacgcgtcctgatgaaaaacagtatgatacggtggaaacccagttacgctttatgacagaaaacggcttttcactgcgcgacgggttatatgcgatttcagcggtcagtcattttaccttaggtgccgtactggagcagcaggagcatactgccgccctgaccgaccgccctgcagcaccggacgaaaacctgccgccgctattgcgggaagcgctgcagattatggacagtgatgatggtgagcaggcctttctgcatggcctggagagcctgatccgggggtttgaggtgcagcttacggcactgttgcaaatagtc

SEQ ID NO: 302 - DNA, 624 bp, Artificial; identical to SEQ ID NO: 268
  Modified tetracycline repressor

SEQ ID NO: 303 - DNA, 624 bp, Artificial
  Modified tetracycline repressor
atgtctagattagataaaagtaaagtgattaacagcgcattagagctgcttaatgaggtcggaatcgaaggtttaacaacccgtaaactcgcccagaagcttggtgtagagcagcctacattgtattggcatgtaaaaaataagcgggccctaatggatgcgatgccgttggtgatcctggcgcgtcatcatgattattcactgcctgcggcgggggaatcctggcagtcatttctgcgcaataatgcaatgagtttccgccgcgcgctgctgcgttaccgtgacggggcaaaagtgcacctcggcacgcgtcctgatgaaaaacagtatgatacggtggaaacccagttacgctttatgacagaaaacggcttttcactgcgcgacgggttatatgcgatttcagcggtcagtcattttaccttaggtgccgtactggagcagcaggagcatactgccgccctgaccgaccgccctgcagcaccggacgaaaacctgccgccgctattgcgggaagcgctgcagattatggacagtgatgatggtgagcaggcctttctgtatggcctggagagcctgatccgggggtttgaggtgcagcttacggcactgttgcaaatagtc

SEQ ID NO: 304 - DNA, 624 bp, Artificial
  Modified tetracycline repressor
atgtctagattagataaaagtaaagtgattaacagcgcattagagctgcttaatgaggtcggaatcgaaggtttaacaacccgtaaactcgcccagaagcttggtgtagagcagcctacattgtattggcatgtaaaaaataagcgggccctactggatgcgctgccgttggtgatcctggcgcgtcatcatgattattcactgcctgcggcgggggaatcctggcagtcatttctgcgcaataatgcaatgagtttccgccgcgcgctgctgcgttaccgtgacggggcaaaagtgcacctcggcacgcgtcctgatgaaaaacagtatgatacggtggaaacccagttacgctttatgacagaaaacggcttttcactgcgcgacgggttatatgcgatttcagcggtcagtcattttaccttaggtgccgtactggagcagcaggagcatactgccgccctgaccgaccgccctgcagcaccggacgaaaacctgccgccgctattgcgggaagcgctgcagattatggacagtgatgatggtgagcaggcctttctgcatggcctggagagcctgatccgggggtttgaggtgcagcttacggcactgttgcaaatagtc

SEQ ID NO: 305 - DNA, 624 bp, Artificial
  Modified tetracycline repressor
atgtctagattagataaaagtaaagtgattaacagcgcattagagctgcttaatgaggtcggaatcgaaggtttaacaacccgtaaactcgcccagaagcttggtgtagagcagcctacattgtattggcatgtaaaaaataagcgggccctactggaatctctggcggtggagatcttgccgcgtcatcatgattattcactgcctgcggcgggggaatcctggcagtcatttctgcgcaataatgcaatgagtttccgccgcgcgctgctgcgttaccgtgacggggcaaaagtgcacctcggcacgcgtcctgatgaaaaacagtatgatacggtggaaacccagttacgctttatgacagaaaacggcttttcactgcgcgacgggttatatgcgatttcagcggtcagtcattttaccttaggtgccgtactggagcagcaggagcatactgccgccctgaccgaccgccctgcagcaccggacgaaaacctgccgccgctattgcgggaagcgctgcagattatggacagtgatgatggtgagcaggcctttctgcatggcctggagagcctgatccgggggtttgaggtgcagcttacggcactgttgcaaatagtc

SEQ ID NO: 306 - DNA, 624 bp, Artificial
  Modified tetracycline repressor
atgtctagattagataaaagtaaagtgattaacagcgcattagagctgcttaatgaggtcggaatcgaaggtttaacaacccgtaaactcgcccagaagcttggtgtagagcagcctacattgtattggcatgtaaaaaataagcgggccctactggaatcgctggcggtggagatgttgccccgtcatcatgattattcactgcctgcggcgggggaatcctggcagtcatttctgcgcaataatgcaatgagtttccgccgcgcgctgctgcgttaccgtgacggggcaaaagtgcacctcggcacgcgtcctgatgaaaaacagtatgatacggtggaaacccagttacgctttatgacagaaaacggcttttcactgcgcgacgggttatatgcgatttcagcggtcagtcattttaccttaggtgccgtactggagcagcaggagcatactgccgccctgaccgaccgccctgcagcaccggacgaaaacctgccgccgctattgcgggaagcgctgcagattatggacagtgatgatggtgagcaggcctttctgcatggcctggagagcctgatccgggggtttgaggtgcagcttacggcactgttgcaaatagtc

SEQ ID NO: 307 - DNA, 624 bp, Artificial
  Modified tetracycline repressor
atgtctagattagataaaagtaaagtgattaacagcgcattagagctgcttaatgaggtcggaatcgaaggtttaacaacccgtaaactcgcccagaagcttggtgtagagcagcctacattgtattggcatgtaaaaaataagcgggccctactggatgcgctggcggtggagatcttggcgcgtcatcatgattattcactgcctgcggcgggggaatcctggcagtcatttctgcgcaataatgcaatgagtttccgccgcgcgctgctgcgttaccgtgacgaggcaacagtgcacctcggcacgcgtcctgatgaaaaacagtatgatacggtggaaacccagttacgctttatgacagaaaacggcttttcactgcgcgacgggttatatgcgatttcagcggtcagtcattttaccttaggtgccgtactggagcagcaggagcatactgccgccctgaccgaccgccctgcagcaccggacgaaaacctgccgccgctattgcgggaagcgctgcagattatggacagtgatgatggtgagcaggcctttctgcatggcctggagagcctgatccgggggtttgaggtgcagcttacggcactgttgcaaatagtc

SEQ ID NO: 308 - DNA, 624 bp, Artificial
  Modified tetracycline repressor
atgtctagattagataaaagtaaagtgattaacagcgcattagagctgcttaatgaggtcggaatcgaaggtttaacaacccgtaaactcgcccagaagcttggtgtagagcagcctacattgtattggcatgtaaaaaataagcgggccctactggatgcgctggcggtggagatcttggcgcgtcatcatgattattcactgcctgcggcgggggaatcctggcagtcatttctgcgcaataatgcaatgagtttccgccgcgcgctgctgcgttaccgtgacgaggcaaaagtgcacctcggcacgcgtcctgatgaaaaacagtatgatacggcggaaacccagttacgctttatgacagaaaacggcttttcactgcgcgacgggttatatgcgatttcagcggtcagtcattttaccttaggtgccgtactggagcagcaggagcatactgccgccctgaccgaccgccctgcagcaccggacgaaaacctgccgccgctattgcgggaagcgctgcagattatggacagtgatgatggtgagcaggcctttctgcatggcctggagagcctgatccgggggtttgaggtgcagcttacggcactgttgcaaatagtc

SEQ ID NO: 309 - DNA, 624 bp, Artificial
  Modified tetracycline repressor
atgtctagattagataaaagtaaagtgattaacagcgcattagagctgcttaatgaggtcggaatcgaaggtttaacaacccgtaaactcgcccagaagcttggtgtagagcagcctacattgtattggcatgtaaaaaataagcgggccctactggatgcgctggcggtggagatcttggcgcgtcatcatgattattcactgcctgcggcgggggaatcctggcagtcatttctgcgcaataatgcaatgagtttccgccgcgcgctgctgcgttaccgtgacagggcaaaagtgcacatcggcacgcgtcctgatgaaaaacagtatgatacggtggaaacccagttacgctttatgacagaaaacggcttttcactgcgcgacgggttatatgcgatttcagcggtcagtcattttaccttaggtgccgtactggagcagcaggagcatactgccgccctgaccgaccgccctgcagcaccggacgaaaacctgccgccgctattgcgggaagcgctgcagattatggacagtgatgatggtgagcaggcctttctgcatggcctggagagcctgatccgggggtttgaggtgcagcttacggcactgttgcaaatagtc

SEQ ID NO: 310 - DNA, 624 bp, Artificial
  Modified tetracycline repressor
atgtctagattagataaaagtaaagtgattaacagcgcattagagctgcttaatgaggtcggaatcgaaggtttaacaacccgtaaactcgcccagaagcttggtgtagagcagcctacattgtattggcatgtaaaaaataagcgggccctactggatgcgctggcggtggagatcttggcgcgtcatcatgattattcactgcctgcggcgggggaatcctggcagtcatttctgcgcaataatgcaatgagtttccgccgcgcgctgctgcgttacggtgactgggcaaaagtgcacctcggcacgcgtcctgatgaaaaacagtatgatacggtggaaacccagttacgctttatgacagaaaacggcttttcactgcgcgacgggttatatgcgatttcagcggtcagtcattttaccttaggtgccgtactggagcagcaggagcatactgccgccctgaccgaccgccctgcagcaccggacgaaaacctgccgccgctattgcgggaagcgctgcagattatggacagtgatgatggtgagcaggcctttctgcatggcctggagagcctgatccgggggtttgaggtgcagcttacggcactgttgcaaatagtc

SEQ ID NO: 311 - DNA, 624 bp, Artificial
  Modified tetracycline repressor
atgtctagattagataaaagtaaagtgattaacagcgcattagagctgcttaatgaggtcggaatcgaaggtttaacaacccgtaaactcgcccagaagcttggtgtagagcagcctacattgtattggcatgtaaaaaataagcgggccctactggatgcgctggcggtggagatcttggcgcgtcatcatgattattcactgcctgcggcgggggaatcctggcagtcatttctgcgcaataatgcaatgagtttccgccgcgcgctgctgcgttaccgtggcagggcaaaagtgctcctcggcacgcgtcctgatgaaaaacagtatgatacggtggaaacccagttacgctttatgacagaaaacggcttttcactgcgcgacgggttatatgcgatttcagcggtcagtcattttaccttaggtgccgtactggagcagcaggagcatactgccgccctgaccgaccgccctgcagcaccggacgaaaacctgccgccgctattgcgggaagcgctgcagattatggacagtgatgatggtgagcaggcctttctgcatggcctggagagcctgatccgggggtttgaggtgcagcttacggcactgttgcaaatagtc

SEQ ID NO: 312 - DNA, 624 bp, Artificial
  Modified tetracycline repressor
atgtctagattagataaaagtaaagtgattaacagcgcattagagctgcttaatgaggtcggaatcgaaggtttaacaacccgtaaactcgcccagaagcttggtgtagagcagcctacattgtattggcatgtaaaaaataagcgggccctactggatgcgctggcggtggagatcttggcgcgtcatcatgattattcactgcctgcggcgggggaatcctggcagtcatttctgcgcaataatgcaatgagtttccgccgcgcgctgctgcgttaccgtgaccaggcaaaagtgcacctcagcacgcgtcctgatgaaaaacagtatgatacggtggaaacccagttacgctttatgacagaaaacggcttttcactgcgcgacgggttatatgcgatttcagcggtcagtcattttaccttaggtgccgtactggagcagcaggagcatactgccgccctgaccgaccgccctgcagcaccggacgaaaacctgccgccgctattgcgggaagcgctgcagattatggacagtgatgatggtgagcaggcctttctgcatggcctggagagcctgatccgggggtttgaggtgcagcttacggcactgttgcaaatagtc

SEQ ID NO: 313 - DNA, 624 bp, Artificial
  Modified tetracycline repressor
atgtctagattagataaaagtaaagtgattaacagcgcattagagctgcttaatgaggtcggaatcgaaggtttaacaacccgtaaactcgcccagaagcttggtgtagagcagcctacattgtattggcatgtaaaaaataagcgggccctactggatgcgctggcggtggagatcttggcgcgtcatcatgattattcactgcctgcggcgggggaatcctggcagtcatttctgcgcaataatgcaatgagtttccgccgcgcgctgctgcgttaccgtgaaggggaaaaagtgcacctcggcacgcgtcctgatgaaaaacagtatgatacggtggaaacccagttacgctttatgacagaaaacggcttttcactgcgcgacgggttatatgcgatttcagcggtcagtcattttaccttaggtgccgtactggagcagcaggagcatactgccgccctgaccgaccgccctgcagcaccggacgaaaacctgccgccgctattgcgggaagcgctgcagattatggacagtgatgatggtgagcaggcctttctgcatggcctggagagcctgatccgggggtttgaggtgcagcttacggcactgttgcaaatagtc

SEQ ID NO: 314 - DNA, 624 bp, Artificial
  Modified tetracycline repressor
atgtctagattagataaaagtaaagtgattaacagcgcattagagctgcttaatgaggtcggaatcgaaggtttaacaacccgtaaactcgcccagaagcttggtgtagagcagcctacattgtattggcatgtaaaaaataagcgggccctactggatgcgctggcggtggagatcttggcgcgtcatcatgattattcactgcctgcggcgggggaatcctggcagtcatttctgcgcaataatgcaatgagtttccgccgcgcgctgctgcgttcccgtgaaggggcaaaagtgcacctcgccacgcgtcctgatgaaaaacagtatgatacggtggaaacccagttacgctttatgacagaaaacggcttttcactgcgcgacgggttatatgcgatttcagcggtcagtcattttaccttaggtgccgtactggagcagcaggagcatactgccgccctgaccgaccgccctgcagcaccggacgaaaacctgccgccgctattgcgggaagcgctgcagattatggacagtgatgatggtgagcaggcctttctgcatggcctggagagcctgatccgggggtttgaggtgcagcttacggcactgttgcaaatagtc

SEQ ID NO: 315 - DNA, 624 bp, Artificial
  Modified tetracycline repressor
atgtctagattagataaaagtaaagtgattaacagcgcattagagctgcttaatgaggtcggaatcgaaggtttaacaacccgtaaactcgcccagaagcttggtgtagagcagcctacattgtattggcatgtaaaaaataagcgggccctactggatgcgctggcggtggagatcttggcgcgtcatcatgattattcactgcctgcggcgggggaatcctggcagtcatttctgcgcaataatgcaatgagtttccgccgcgcgctgctgcgtttccgtgactgggaaaaagtgaacctcggcacgcgtcctgatgaaaaacagtatgatacggtggaaacccagttacgctttatgacagaaaacggcttttcactgcgcgacgggttatatgcgatttcagcggtcagtcattttaccttaggtgccgtactggagcagcaggagcatactgccgccctgaccgaccgccctgcagcaccggacgaaaacctgccgccgctattgcgggaagcgctgcagattatggacagtgatgatggtgagcaggcctttctgcatggcctggagagcctgatccgggggtttgaggtgcagcttacggcactgttgcaaatagtc

SEQ ID NO: 316 - DNA, 624 bp, Artificial
  Modified tetracycline repressor
atgtctagattagataaaagtaaagtgattaacagcgcattagagctgcttaatgaggtcggaatcgaaggtttaacaacccgtaaactcgcccagaagcttggtgtagagcagcctacattgtattggcatgtaaaaaataagcgggccctactggatgcgctggcggtggagatcttggcgcgtcatcatgattattcactgcctgcgacgggggaatcctggcagtcatttctgcgcaataatgcaatgagtttccgccgcgcgctgctgcgttaccgtgacgaggcaaaagtgcacctcggcacgcgtcctgatgaaaaacagtatgatacggtggaaacccagttacgctttatgacagaaaacggcttttcactgcgcgacgggttatatgcgatttcagcggtcagtcattttaccttaggtgccgtactggagcagcaggagcatactgccgccctgaccgaccgccctgcagcaccggacgaaaacctgccgccgctattgcgggaagcgctgcagattatggacagtgatgatggtgagcaggcctttctgcatggcctggagagcctgatccgggggtttgaggtgcagcttacggcactgttgcaaatagtc

SEQ ID NO: 317 - DNA, 624 bp, Artificial
  Modified tetracycline repressor
atgtctagattagataaaagtaaagtgattaacagcgcattagagctgcttaatgaggtcggaatcgaaggtttaacaacccgtaaactcgcccagaagcttggtgtagagcagcctacattgtattggcatgtaaaaaataagcgggccctactggatgcgctggcggtggagatcttggcgcgtcatcatgattattcactgcctgcggcgggggaatcctggcagtcatttctgcgcaataatgcaatgagtttccgccgcgcgctgctgcgttaccgtgacaggtcaaaactgcacctcggcacgcgtcctgatgaaaaacagtatgatacggtggaaacccagttacgctttatgacagaaaacggcttttcactgcgcgacgggttatatgcgatttcagcggtcagtcattttaccttaggtgccgtactggagcagcaggagcatactgccgccctgaccgaccgccctgcagcaccggacgaaaacctgccgccgctattgcgggaagcgctgcagattatggacagtgatgatggtgagcaggcctttctgcatggcctggagagcctgatccgggggtttgaggtgcagcttacggcactgttgcaaatagtc

SEQ ID NO: 318 - DNA, 624 bp, Artificial
  Modified tetracycline repressor
atgtctagattagataaaagtaaagtgattaacagcgcattagagctgcttaatgaggtcggaatcgaaggtttaacaacccgtaaactcgcccagaagcttggtgtagagcagcctacattgtattggcatgtaaaaaataagcgggccctactggatgcgctggcggtggagatcttggcgcgtcatcatgattattcactgcctgcggcgggggaatcctggcagtcatttctgcgcaataatgcaatgagtttccgccgcgcgctgctgcgttaccgtgacgggactagagggcacctcggcacgcgtcctgatgaaaaacagtatgatacggtggaaacccagttacgctttatgacagaaaacggcttttcactgcgcgacgggttatatgcgatttcagcggtcagtcattttaccttaggtgccgtactggagcagcaggagcatactgccgccctgaccgaccgccctgcagcaccggacgaaaacctgccgccgctattgcgggaagcgctgcagattatggacagtgatgatggtgagcaggcctttctgcatggcctggagagcctgatccgggggtttgaggtgcagcttacggcactgttgcaaatagtc

SEQ ID NO: 319 - DNA, 624 bp, Artificial
  Modified tetracycline repressor
atgtctagattagataaaagtaaagtgattaacagcgcattagagctgcttaatgaggtcggaatcgaaggtttaacaacccgtaaactcgcccagaagcttggtgtagagcagcctacattgtattggcatgtaaaaaataagcgggccctactggatgcgctggcggtggagatcttggcgcgtcatcatgattattcactgcctgcggcgggggaatcctggcagtcatttctgcgcaataatgcaatgagtttccgccgcgcgctgctgcgttaccgtgacggggcaaaagggcccctcggcacgcgtcctgatgaaaaacagtatgatacggtggaaacccagttacgctttatgacagaaaacggcttttcactgcgcgacgggttatatgcgatttcagcggtcagtcattttaccttaggtgccgtactggagcagcaggagcatactgccgccctgaccgaccgccctgcagcaccggacgaaaacctgccgccgctattgcgggaagcgctgcagattatggacagtgatgatggtgagcaggcctttctgcatggcctggagagcctgatccgggggtttgaggtgcagcttacggcactgttgcaaatagtc

SEQ ID NO: 320 - DNA, 624 bp, Artificial; identical to SEQ ID NO: 312
  Modified tetracycline repressor

SEQ ID NO: 321 - DNA, 624 bp, Artificial
  Modified tetracycline repressor
atgtctagattagataaaagtaaagtgattaacagcgcattagagctgcttaatgaggtcggaatcgaaggtttaacaacccgtaaactcgcccagaagcttggtgtagagcagcctacattgtattggcatgtaaaaaataagcgggccctactggatgcgctggcggtggagatcttggcgcgtcatcatgattattcactgcctgcggcgggggaatcctggcagtcatttgtgcgcaataatgcaatgagtttccgccgcgcgctgctgcgttaccgtgacgggactagagggcacctcggcacgcgtcctgatgaaaaacagtatgatacggtggaaacccagttacgctttatgacagaaaacggcttttcactgcgcgacgggttatatgcgatttcagcggtcagtcattttaccttaggtgccgtactggagcagcaggagcatactgccgccctgaccgaccgccctgcagcaccggacgaaaacctgccgccgctattgcgggaagcgctgcagattatggacagtgatgatggtgagcaggcctttctgcatggcctggagagcctgatccgggggtttgaggtgcagcttacggcactgttgcaaatagtc

SEQ ID NO: 322 - DNA, 624 bp, Artificial; identical to SEQ ID NO: 318
  Modified tetracycline repressor

SEQ ID NO: 323 - DNA, 624 bp, Artificial
  Modified tetracycline repressor
atgtctagattagataaaagtaaagtgattaacagcgcattagagctgcttaatgaggtcggaatcgaaggtttaacaacccgtaaactcgcccagaagcttggtgtagagcagcctacattgtattggcatgtaaaaaataagcgggccctactggatgcgctggcggtggagatcttggcgcgtcatcatgattattcactgcctgcggcgggggaatcctggcagtcatttctgcgcaataatgcaatgagtttccgccgcgcgctgctgcgttaccttgccggggcaaaagtgcagctcggcacgcgtcctgatgaaaaacagtatgatacggtggaaacccagttacgctttatgacagaaaacggcttttcactgcgcgacgggttatatgcgatttcagcggtcagtcattttaccttaggtgccgtactggagcagcaggagcatactgccgccctgaccgaccgccctgcagcaccggacgaaaacctgccgccgctattgcgggaagcgctgcagattatggacagtgatgatggtgagcaggcctttctgcatggcctggagagcctgatccgggggtttgaggtgcagcttacggcactgttgcaaatagtc

SEQ ID NO: 324 - DNA, 624 bp, Artificial
  Modified tetracycline repressor
atgtctagattagataaaagtaaagtgattaacagcgcattagagctgcttaatgaggtcggaatcgaaggtttaacaacccgtaaactcgcccagaagcttggtgtagagcagcctacattgtattggcatgtaaaaaataagcgggccctactggatgcgctggcggtggagatcttggcgcgtcatcatgattattcactgcctgcggcgggggaatcctggcagtcatttctgcgcaataatgcaatgagtttccgccgcgcgctgctgcgttaccgttatggggcaaaagagcacctcggcacgcgtcctgatgaaaaacagtatgatacggtggaaacccagttacgctttatgacagaaaacggcttttcactgcgcgacgggttatatgcgatttcagcggtcagtcattttaccttaggtgccgtactggagcagcaggagcatactgccgccctgaccgaccgccctgcagcaccggacgaaaacctgccgccgctattgcgggaagcgctgcagattatggacagtgatgatggtgagcaggcctttctgcatggcctggagagcctgatccgggggtttgaggtgcagcttacggcactgttgcaaatagtc

SEQ ID NO: 325 - DNA, 624 bp, Artificial; identical to SEQ ID NO: 323
  Modified tetracycline repressor

SEQ ID NO: 326 - DNA, 624 bp, Artificial; identical to SEQ ID NO: 317
  Modified tetracycline repressor

SEQ ID NO: 327 - DNA, 624 bp, Artificial
  Modified tetracycline repressor
atgtctagattagataaaagtaaagtgattaacagcgcattagagctgcttaatgaggtcggaatcgaaggtttaacaacccgtaaactcgcccagaagcttggtgtagagcagcctacattgtattggcatgtaaaaaataagcgggccctactggatgcgctggcggtggagatcttggcgcgtcatcatgattattcactgcctgcggcgggggaatcctggcagtcatttctgcgcaataatgcaatgagtttccgccgcgcgctgctgcgtcaccgtgactgggcacaagggcacctcggcacgcgtcctgatgaaaaacagtatgatacggtggaaacccagttacgctttatgacagaaaacggcttttcactgcgcgacgggttatatgcgatttcagcggtcagtcattttaccttaggtgccgtactggagcagcaggagcatactgccgccctgaccgaccgccctgcagcaccggacgaaaacctgccgccgctattgcgggaagcgctgcagattatggacagtgatgatggtgagcaggcctttctgcatggcctggagagcctgatccgggggtttgaggtgcagcttacggcactgttgcaaatagtc

SEQ ID NO: 328 - DNA, 624 bp, Artificial; identical to SEQ ID NO: 312
  Modified tetracycline repressor

SEQ ID NO: 329 - DNA, 624 bp, Artificial
  Modified tetracycline repressor
atgtctagattagataaaagtaaagtgattaacagcgcattagagctgcttaatgaggtcggaatcgaaggtttaacaacccgtaaactcgcccagaagcttggtgtagagcagcctacattgtattggcatgtaaaaaataagcgggccctactggatgcgctggcggtggagatcttggcgcgtcatcatgattattcactgcctgcggcgggggaatcctggcagtcatttctgcgcaataatgcaatgagtttccgccgcgcgctgctgcgtaaccgtgactgggcaaaagggcacctcggcacgcgtcctgatgaaaaacagtatgatacggtggaaacccagttacgctttatgacagaaaacggcttttcactgcgcgacgggttatatgcgatttcagcggtcagtcattttaccttaggtgccgtactggagcagcaggagcatactgccgccctgaccgaccgccctgcagcaccggacgaaaacctgccgccgctattgcgggaagcgctgcagattatggacagtgatgatggtgagcaggcctttctgcatggcctggagagcctgatccgggggtttgaggtgcagcttacggcactgttgcaaatagtc

SEQ ID NO: 330 - DNA, 624 bp, Artificial
  Modified tetracycline repressor
atgtctagattagataaaagtaaagtgattaacagcgcattagagctgcttaatgaggtcggaatcgaaggtttaacaacccgtaaactcgcccagaagcttggtgtagagcagcctacattgtattggcatgtaaaaaataagcgggccctactggatgcgctggcggtggagatcttggcgcgtcatcatgattattcactgcctgcggcgggggaatcctggcagtcatttctgcgcaataatgcaatgagtttccgccgcgcgctgctgcgttaccgtgacggggcaaaagggcacctcggcacgcgtcctgatgaaaaacagtatgatacggtggaaacccagttacgctttatgacagaaaacggcttttcactgcgcgacgggttatatgcgatttcagcggtcagtcattttaccttaggtgccgtactggagcagcaggagcatactgccgccctgaccgaccgccctgcagcaccggacgaaaacctgccgccgctattgcgggaagcgctgcagattatggacagtgatgatggtgagcaggcctttctgcatggcctggagagcctgatccgggggtttgaggtgcagcttacggcactgttgcaaatagtc

SEQ ID NO: 331 - DNA, 624 bp, Artificial
  Modified tetracycline repressor
atgtctagattagataaaagtaaagtgattaacagcgcattagagctgcttaatgaggtcggaatcgaaggtttaacaacccgtaaactcgcccagaagcttggtgtagagcagcctacattgtattggcatgtaaaaaataagcgggccctactggatgcgctggcggtggagatcttggcgcgtcatcatgattattcactgcctgcggcgggggaatcctggcagtcatttctgcgcaataatgcaatgagtttccgccgcgcgctgctgcgttaccgtgacgggacaaaagggcacctcggcacgcgtcctgatgaaaaacagtatgatacggtggaaacccagttacgctttatgacagaaaacggcttttcactgcgcgacgggttatatgcgatttcagcggtcagtcattttaccttaggtgccgtactggagcagcaggagcatactgccgccctgaccgaccgccctgcagcaccggacgaaaacctgccgccgctattgcgggaagcgctgcagattatggacagtgatgatggtgagcaggcctttctgcatggcctggagagcctgatccgggggtttgaggtgcagcttacggcactgttgcaaatagtc

SEQ ID NO: 332 - DNA, 624 bp, Artificial
  Modified tetracycline repressor
atgtctagattagataaaagtaaagtgattaacagcgcattagagctgcttaatgaggtcggaatcgaaggtttaacaacccgtaaactcgcccagaagcttggtgtagagcagcctacattgtattggcatgtaaaaaataagcgggccctactggatgcgctggcggtggagatcttggcgcgtcatcatgattattcactgcctgcggcgggggaatcctggcagtcatttctgcgcaataatgcaatgagtttccgccgcgcgctgctgcgttaccgtgacgggcctagagaccacctcggcacgcgtcctgatgaaaaacagtatgatacggtggaaacccagttacgctttatgacagaaaacggcttttcactgcgcgacgggttatatgcgatttcagcggtcagtcattttaccttaggtgccgtactggagcagcaggagcatactgccgccctgaccgaccgccctgcagcaccggacgaaaacctgccgccgctattgcgggaagcgctgcagattatggacagtgatgatggtgagcaggcctttctgcatggcctggagagcctgatccgggggtttgaggtgcagcttacggcactgttgcaaatagtc

SEQ ID NO: 333 - DNA, 624 bp, Artificial
  Modified tetracycline repressor
atgtctagattagataaaagtaaagtgattaacagcgcattagagctgcttaatgaggtcggaatcgaaggtttaacaacccgtaaactcgcccagaagcttggtgtagagcagcctacattgtattggcatgtaaaaaataagcgggccctactggatgcgctggcggtggagatcttggcgcgtcatcatgattattcactgcctgcggcgggggaatcctggcagtcatttctgcgcaataatgcaatgagtttccgccgcgcgctgctgcgtttccgtaacggggcaaaattccacctcggcacgcgtcctgatgaaaaacagtatgatacggtggaaacccagttacgctttatgacagaaaacggcttttcactgcgcgacgggttatatgcgatttcagcggtcagtcattttaccttaggtgccgtactggagcagcaggagcatactgccgccctgaccgaccgccctgcagcaccggacgaaaacctgccgccgctattgcgggaagcgctgcagattatggacagtgatgatggtgagcaggcctttctgcatggcctggagagcctgatccgggggtttgaggtgcagcttacggcactgttgcaaatagtc

SEQ ID NO: 334 - DNA, 624 bp, Artificial
  Modified tetracycline repressor
atgtctagattagataaaagtaaagtgattaacagcgcattagagctgcttaatgaggtcggaatcgaaggtttaacaacccgtaaactcgcccagaagcttggtgtagagcagcctacattgtattggcatgtaaaaaataagcgggccctactggatgcgctggcggtggagatcttggcgcgtcatcatgattattcactgcctgcggcgggggaatcctggcagtcatttctgcgcaataatgcaatgagtttccgccgcgcgctgctgcgttaccgtgccggggcaaaagggcacctcggcacgcgtcctgatgaaaaacagtatgatacggtggaaacccagttacgctttatgacagaaaacggcttttcactgcgcgacgggttatatgcgatttcagcggtcagtcattttaccttaggtgccgtactggagcagcaggagcatactgccgccctgaccgaccgccctgcagcaccggacgaaaacctgccgccgctattgcgggaagcgctgcagattatggacagtgatgatggtgagcaggcctttctgcatggcctggagagcctgatccgggggtttgaggtgcagcttacggcactgttgcaaatagtc

SEQ ID NO: 335 - DNA, 624 bp, Artificial
  Modified tetracycline repressor
atgtctagattagataaaagtaaagtgattaacagcgcattagagctgcttaatgaggtcggaatcgaaggtttaacaacccgtaaactcgcccagaagcttggtgtagagcagcctacattgtattggcatgtaaaaaataagcgggccctactggatgcgctggcggttgagatcttggggcgtcatcatgattattcactgcctgcggcgggggaatcctggcagtcatttctgcgcaataatgcaatgagtttccgccgcgcgctgctgcgttaccgtgccggggcaaaagggcacctcggcacgcgtcctgatgaaaaacagtatgatacggtggaaacccagttacgctttatgacagaaaacggcttttcactgcgcgacgggttatatgcgatttcagcggtcagtcattttaccttaggtgccgtactggagcagcaggagcatactgccgccctgaccgaccgccctgcagcaccggacgaaaacctgccgccgctattgcgggaagcgctgcagattatggacagtgatgatggtgagcaggcctttctgcatggcctggagagcctgatccgggggtttgaggtgcagcttacggcactgttgcaaatagtc

SEQ ID NO: 336 - DNA, 624 bp, Artificial
  Modified tetracycline repressor
atgtctagattagataaaagtaaagtgattaacagcgcattagagctgcttaatgaggtcggaatcgaaggtttaacaacccgtaaactcgcccagaagcttggtgtagagcagcctacattgtattggcatgtaaaaaataagcgggccctactggattcgctggcggtggagatcttggcgcgtcatcatgattattcactgcctgcggcgggggaatcctggcagtcatttctgcgcaataatgcaatgagtttccgccgcgcgctgctgcgttaccgtgacggggcaaaacggcacctcggcacgcgtcctgatgaaaaacagtatgatacggtggaaacccagttacgctttatgacagaaaacggcttttcactgcgcgacgggttatatgcgatttcagcggtcagtcattttaccttaggtgccgtactggagcagcaggagcatactgccgccctgaccgaccgccctgcagcaccggacgaaaacctgccgccgctattgcgggaagcgctgcagattatggacagtgatgatggtgagcaggcctttctgcatggcctggagagcctgatccgggggtttgaggtgcagcttacggcactgttgcaaatagtc

SEQ ID NO: 337 - DNA, 624 bp, Artificial
  Modified tetracycline repressor
atgtctagattagataaaagtaaagtgattaacagcgcattagagctgcttaatgaggtcggaatcgaaggtttaacaacccgtaaactcgcccagaagcttggtgtagagcagcctacattgtattggcatgtaaaaaataagcgggccctactgtatgcgctggcggttgagatcttgccacgtcatcatgattattcactgcctgcggcgggggaatcctggcagtcatttctgcgcaataatgcaatgagtttccgccgcgcgctgctgcgttaccgtgacggggcaaaagtgcacctcggcacgcgtcctgatgaaaaacagtatgatacggtggaaacccagttacgctttatgacagaaaacggcttttcactgcgcgacgggttatatgcgatttcagcggtcagtcattttaccttaggtgccgtactggagcagcaggagcatactgccgccctgaccgaccgccctgcagcaccggacgaaaacctgccgccgctattgcgggaagcgctgcagattatggacagtgatgatggtgagcaggcctttctgcatggcctggagagcctgatccgggggtttgaggtgcagcttacggcactgttgcaaatagtc

SEQ ID NO: 338 - DNA, 624 bp, Artificial
  Modified tetracycline repressor
atgtctagattagataaaagtaaagtgattaacagcgcattagagctgcttaatgaggtcggaatcgaaggtttaacaacccgtaaactcgcccagaagcttggtgtagagcagcctacattgtattggcatgtaaaaaataagcgggccctactggatgcgcttgcggtggagatcgtggcgcgtcatcatgattattcactgcctgcggcgggggaatcctggcagtcatttctgcgcaataatgcaatgagtttccgccgcgcgctgctgcgttaccgtgacggggtaaaagggcacctcggcacgcgtcctgatgaaaaacagtatgatacggtggaaacccagttacgctttatgacagaaaacggcttttcactgcgcgacgggttatatgcgatttcagcggtcagtcattttaccttaggtgccgtactggagcagcaggagcatactgccgccctgaccgaccgccctgcagcaccggacgaaaacctgccgccgctattgcgggaagcgctgcagattatggacagtgatgatggtgagcaggcctttctgcatggcctggagagcctgatccgggggtttgaggtgcagcttacggcactgttgcaaatagtc

SEQ ID NO: 339 - DNA, 624 bp, Artificial
  Modified tetracycline repressor
atgtctagattagataaaagtaaagtgattaacagcgcattagagctgcttaatgaggtcggaatcgaaggtttaacaacccgtaaactcgcccagaagcttggtgtagagcagcctacattgtattggcatgtaaaaaataagcgggccctactggatgcgctgtcggtggagatcttggcgcgtcatcatgattattcactgcctgcggcgggggaatcctggcagtcatttctgcgcaataatgcaatgagtttccgccgcgcgctgctgcgttaccgtgacggggcaaaagagcacctcggcacgcgtcctgatgaaaaacagtatgatacggtggaaacccagttacgctttatgacagaaaacggcttttcactgcgcgacgggttatatgcgatttcagcggtcagtcattttaccttaggtgccgtactggagcagcaggagcatactgccgccctgaccgaccgccctgcagcaccggacgaaaacctgccgccgctattgcgggaagcgctgcagattatggacagtgatgatggtgagcaggcctttctgcatggcctggagagcctgatccgggggtttgaggtgcagcttacggcactgttgcaaatagtc

SEQ ID NO: 340 - DNA, 624 bp, Artificial
  Modified tetracycline repressor
atgtctagattagataaaagtaaagtgattaacagcgcattagagctgcttaatgaggtcggaatcgaaggtttaacaacccgtaaactcgcccagaagcttggtgtagagcagcctacattgtattggcatgtaaaaaataagcgggccctactggatgcgctgtcggtggaggcctgggcgcgtcatcatgattattcactgcctgcggcgggggaatcctggcagtcatttctgcgcaataatgcaatgagtttccgccgcgcgctgctgcgttaccgtgacggggcaaaagtacacctcggcacgcgtcctgatgaaaaacagtatgatacggtggaaacccagttacgctttatgacagaaaacggcttttcactgcgcgacgggttatatgcgatttcagcggtcagtcattttaccttaggtgccgtactggagcagcaggagcatactgccgccctgaccgaccgccctgcagcaccggacgaaaacctgccgccgctattgcgggaagcgctgcagattatggacagtgatgatggtgagcaggcctttctgcatggcctggagagcctgatccgggggtttgaggtgcagcttacggcactgttgcaaatagtc

SEQ ID NO: 341 - DNA, 624 bp, Artificial
  Modified tetracycline repressor
atgtctagattagataaaagtaaagtgattaacagcgcattagagctgcttaatgaggtcggaatcgaaggtttaacaacccgtaaactcgcccagaagcttggtgtagagcagcctacattgtattggcatgtaaaaaataagcgggccctactggatgcgctggcggtggagatcttggcgcgtcatcatgattattcactgcctgcggcgggggaatcctggcagtcatttctgcgcaataatgcaatgagtttccgccgcgcgctgctgcgttaccgtgaccgggcaaaactgcacatcggcacgcgtcctgatgaaaaacagtatgatacggtggaaacccagttacgctttatgacagaaaacggcttttcactgcgcgacgggttatatgcgatttcagcggtcagtcattttaccttaggtgccgtactggagcagcaggagcatactgccgccctgaccgaccgccctgcagcaccggacgaaaacctgccgccgctattgcgggaagcgctgcagattatggacagtgatgatggtgagcaggcctttctgcatggcctggagagcctgatccgggggtttgaggtgcagcttacggcactgttgcaaatagtc

SEQ ID NO: 342 - DNA, 624 bp, Artificial
  Modified tetracycline repressor
atgtctagattagataaaagtaaagtgattaacagcgcattagagctgcttaatgaggtcggaatcgaaggtttaacaacccgtaaactcgcccagaagcttggtgtagagcagcctacattgtattggcatgtaaaaaataagcgggccctactggatgcgctggcggtggagatcttgacgcgtcatcatgattattcactgcctgcggcgggggaatcctggcagtcatttctgcgcaataatgcaatgagtttccgccgcgcgctgctgcgttaccgtgacggggcaaaacggcacctcggcacgcgtcctgatgaaaaacagtatgatacggtggaaacccagttacgctttatgacagaaaacggcttttcactgcgcgacgggttatatgcgatttcagcggtcagtcattttaccttaggtgccgtactggagcagcaggagcatactgccgccctgaccgaccgccctgcagcaccggacgaaaacctgccgccgctattgcgggaagcgctgcagattatggacagtgatgatggtgagcaggcctttctgcatggcctggagagcctgatccgggggtttgaggtgcagcttacggcactgttgcaaatagtc

SEQ ID NO: 343 - DNA, 624 bp, Artificial
  Modified tetracycline repressor
atgtctagattagataaaagtaaagtgattaacagcgcattagagctgcttaatgaggtcggaatcgaaggtttaacaacccgtaaactcgcccagaagcttggtgtagagcagcctacattgtattggcatgtaaaaaataagcgggccctactggatgcgctggcggtggagagcctggcgggtcatcatgattattcactgcctgcggcgggggaatcctggcagtcatttctgcgcaataatgcaatgagtttccgccgcgcgctgctgcgttaccgtgccggggcaaaattgcacctcggcacgcgtcctgatgaaaaacagtatgatacggtggaaacccagttacgctttatgacagaaaacggcttttcactgcgcgacgggttatatgcgatttcagcggtcagtcattttaccttaggtgccgtactggagcagcaggagcatactgccgccctgaccgaccgccctgcagcaccggacgaaaacctgccgccgctattgcgggaagcgctgcagattatggacagtgatgatggtgagcaggcctttctgcatggcctggagagcctgatccgggggtttgaggtgcagcttacggcactgttgcaaatagtc

SEQ ID NO: 344 - DNA, 624 bp, Artificial
  Modified tetracycline repressor
atgtctagattagataaaagtaaagtgattaacagcgcattagagctgcttaatgaggtcggaatcgaaggtttaacaacccgtaaactcgcccagaagcttggtgtagagcagcctacattgtattggcatgtaaaaaataagcgggccctactggatgcgctggcggtggagatcttggcgcgtcatcatgattattcactgcctgcggcgggggaatcctggcagtcatttctgcgcaataatgcaatgagtttccgccgcgcgctgctgcgttaccgtgacggggcaaaacggcacctcggcacgcgtcctgatgaaaaacagtatgatacggtggaaacccagttacgctttatgacagaaaacggcttttcactgcgcgacgggttatatgcgatttcagcggtcagtcattttaccttaggtgccgtactggagcagcaggagcatactgccgccctgaccgaccgccctgcagcaccggacgaaaacctgccgccgctattgcgggaagcgctgcagattatggacagtgatgatggtgagcaggcctttctgcatggcctggagagcctgatccgggggtttgaggtgcagcttacggcactgttgcaaatagtc

SEQ ID NO: 345 - DNA, 624 bp, Artificial
  Modified tetracycline repressor
atgtctagattagataaaagtaaagtgattaacagcgcattagagctgtctaatgaggtcggaatcaaaggtttaacaacccgtaaactcgcccagaagcttggtgtagagcagcctacattgtattggcatgtaaaaaataagcgggccctactggatgcgctggcggtggagatcttggcgcgtcatcatgattattcactgcctgcggcgggggaatcctggcagtcatttctgcgcaataatgcaatgagtttccgccgcgcgctgctgcgttaccgtgacggggcaaaagtgcacctcggcacgcgtcctgatgaaaaacagtatgatacggtggaaacccagttacgctttatgacagaaaacggcttttcactgcgcgacgggttatatgcgatttcagcggtcagtcattttaccttaggtgccgtactggagcagcaggagcatactgccgccctgaccgaccgccctgcagcaccggacgaaaacctgccgccgctattgcgggaagcgctgcagattatggacagtgatgatggtgagcaggcctttctgcatggcctggagagcctgatccgggggtttgaggtgcagcttacggcactgttgcaaatagtc

SEQ ID NO: 346 - DNA, 624 bp, Artificial
  Modified tetracycline repressor
atgtctagattagataaaagtaaagtgattaacagcgcattagagctgcataatgaggtcggattcggaggtttaacaacccgtaaactcgcccagaagcttggtgtagagcagcctacattgtattggcatgtaaaaaataagcgggccctactggatgcgctggcggtggagatcttggcgcgtcatcatgattattcactgcctgcggcgggggaatcctggcagtcatttctgcgcaataatgcaatgagtttccgccgcgcgctgctgcgttaccgtgacggggcaaaagtgcacctcggcacgcgtcctgatgaaaaacagtatgatacggtggaaacccagttacgctttatgacagaaaacggcttttcactgcgcgacgggttatatgcgatttcagcggtcagtcattttaccttaggtgccgtactggagcagcaggagcatactgccgccctgaccgaccgccctgcagcaccggacgaaaacctgccgccgctattgcgggaagcgctgcagattatggacagtgatgatggtgagcaggcctttctgcatggcctggagagcctgatccgggggtttgaggtgcagcttacggcactgttgcaaatagtc

SEQ ID NO: 347 - DNA, 624 bp, Artificial
  Modified tetracycline repressor
atgtctagattagataaaagtaaagtgattaacagcgcattagagctgcttaaggacctcggaaacgcaggtttaacaacccgtaaactcgcccagaagcttggtgtagagcagcctacattgtattggcatgtaaaaaataagcgggccctactggatgcgctggcggtggagatcttggcgcgtcatcatgattattcactgcctgcggcgggggaatcctggcagtcatttctgcgcaataatgcaatgagtttccgccgcgcgctgctgcgttaccgtgacggggcaaaagtgcacctcggcacgcgtcctgatgaaaaacagtatgatacggtggaaacccagttacgctttatgacagaaaacggcttttcactgcgcgacgggttatatgcgatttcagcggtcagtcattttaccttaggtgccgtactggagcagcaggagcatactgccgccctgaccgaccgccctgcagcaccggacgaaaacctgccgccgctattgcgggaagcgctgcagattatggacagtgatgatggtgagcaggcctttctgcatggcctggagagcctgatccgggggtttgaggtgcagcttacggcactgttgcaaatagtc

SEQ ID NO: 348 - DNA, 624 bp, Artificial
  Modified tetracycline repressor
atgtctagattagataaaagtaaagtgattaacagcgcattagtgctggctaatgatgtcggaatcgaaggtttaacaacccgtaaactcgcccagaagcttggtgtagagcagcctacattgtattggcatgtaaaaaataagcgggccctactggatgcgctggcggtggagatcttggcgcgtcatcatgattattcactgcctgcggcgggggaatcctggcagtcatttctgcgcaataatgcaatgagtttccgccgcgcgctgctgcgttaccgtgacggggcaaaagtgcacctcggcacgcgtcctgatgaaaaacagtatgatacggtggaaacccagttacgctttatgacagaaaacggcttttcactgcgcgacgggttatatgcgatttcagcggtcagtcattttaccttaggtgccgtactggagcagcaggagcatactgccgccctgaccgaccgccctgcagcaccggacgaaaacctgccgccgctattgcgggaagcgctgcagattatggacagtgatgatggtgagcaggcctttctgcatggcctggagagcctgatccgggggtttgaggtgcagcttacggcactgttgcaaatagtc

SEQ ID NO: 349 - DNA, 621 bp, Artificial
  Modified tetracycline repressor
atgtctagattagataaaagtaaagtgattaacagcgcattagagctgtttaatgtcggaatcgaagggttaacaacccgtaaactcgcccagaagcttggtgtagagcagcctacattgtattggcatgtaaaaaataagcgggccctactggatgcgctggcggtggagatcttggcgcgtcatcatgattattcactgcctgcggcgggggaatcctggcagtcatttctgcgcaataatgcaatgagtttccgccgcgcgctgctgcgttaccgtgacggggcaaaagtgcacctcggcacgcgtcctgatgaaaaacagtatgatacggtggaaacccagttacgctttatgacagaaaacggcttttcactgcgcgacgggttatatgcgatttcagcggtcagtcattttaccttaggtgccgtactggagcagcaggagcatactgccgccctgaccgaccgccctgcagcaccggacgaaaacctgccgccgctattgcgggaagcgctgcagattatggacagtgatgatggtgagcaggcctttctgcatggcctggagagcctgatccgggggtttgaggtgcagcttacggcactgttgcaaatagtc

SEQ ID NO: 350 - DNA, 624 bp, Artificial
  Modified tetracycline repressor
atgtctagattagataaaagtaaagtgattaacagcgcatcagagctgctttatgaggtcggattcgaaggtttgacaacccgtaaactcgcccagaagcttggtgtagagcagcctacattgtattggcatgtaaaaaataagcgggccctactggatgcgctggcggtggagatcttggcgcgtcatcatgattattcactgcctgcggcgggggaatcctggcagtcatttctgcgcaataatgcaatgagtttccgccgcgcgctgctgcgttaccgtgacggggcaaaagtgcacctcggcacgcgtcctgatgaaaaacagtatgatacggtggaaacccagttacgctttatgacagaaaacggcttttcactgcgcgacgggttatatgcgatttcagcggtcagtcattttaccttaggtgccgtactggagcagcaggagcatactgccgccctgaccgaccgccctgcagcaccggacgaaaacctgccgccgctattgcgggaagcgctgcagattatggacagtgatgatggtgagcaggcctttctgcatggcctggagagcctgatccgggggtttgaggtgcagcttacggcactgttgcaaatagtc

SEQ ID NO: 351 - DNA, 624 bp, Artificial
  Modified tetracycline repressor
atgtctagattagataaaagtaaagtgattaacagcgcattggcgctgggtaatgaggtcggaatcgaaggtgtaacaacccgtaaactcgcccagaagcttggtgtagagcagcctacattgtattggcatgtaaaaaataagcgggccctactggatgcgctggcggtggagatcttggcgcgtcatcatgattattcactgcctgcggcgggggaatcctggcagtcatttctgcgcaataatgcaatgagtttccgccgcgcgctgctgcgttaccgtgacggggcaaaagtgcacctcggcacgcgtcctgatgaaaaacagtatgatacggtggaaacccagttacgctttatgacagaaaacggcttttcactgcgcgacgggttatatgcgatttcagcggtcagtcattttaccttaggtgccgtactggagcagcaggagcatactgccgccctgaccgaccgccctgcagcaccggacgaaaacctgccgccgctattgcgggaagcgctgcagattatggacagtgatgatggtgagcaggcctttctgcatggcctggagagcctgatccgggggtttgaggtgcagcttacggcactgttgcaaatagtc

SEQ ID NO: 352 - DNA, 624 bp, Artificial
  Modified tetracycline repressor
atgtctagattagataaaagtaaagtgattaacagcgcctcagagctgcttaaagaggtcggaatcgtaggtttaacaacccgtaaactcgcccagaagcttggtgtagagcagcctacattgtattggcatgtaaaaaataagcgggccctactggatgcgctggcggtggagatcttggcgcgtcatcatgattattcactgcctgcggcgggggaatcctggcagtcatttctgcgcaataatgcaatgagtttccgccgcgcgctgctgcgttaccgtgacggggcaaaagtgcacctcggcacgcgtcctgatgaaaaacagtatgatacggtggaaacccagttacgctttatgacagaaaacggcttttcactgcgcgacgggttatatgcgatttcagcggtcagtcattttaccttaggtgccgtactggagcagcaggagcatactgccgccctgaccgaccgccctgcagcaccggacgaaaacctgccgccgctattgcgggaagcgctgcagattatggacagtgatgatggtgagcaggcctttctgcatggcctggagagcctgatccgggggtttgaggtgcagcttacggcactgttgcaaatagtc

SEQ ID NO: 353 - DNA, 624 bp, Artificial
  Modified tetracycline repressor
atgtctagattagataaaagtaaagtgattaacagcgcaacagagctgctttatgaggtcggattcgaaggtttaacaacccgtaaactcgcccagaagcttggtgtagagcagcctacattgtattggcatgtaaaaaataagcgggccctactggatgcgctggcggtggagatcttggcgcgtcatcatgattattcactgcctgcggcgggggaatcctggcagtcatttctgcgcaataatgcaatgagtttccgccgcgcgctgctgcgttaccgtgacggggcaaaagtgcacctcggcacgcgtcctgatgaaaaacagtatgatacggtggaaacccagttacgctttatgacagaaaacggcttttcactgcgcgacgggttatatgcgatttcagcggtcagtcattttaccttaggtgccgtactggagcagcaggagcatactgccgccctgaccgaccgccctgcagcaccggacgaaaacctgccgccgctattgcgggaagcgctgcagattatggacagtgatgatggtgagcaggcctttctgcatggcctggagagcctgatccgggggtttgaggtgcagcttacggcactgttgcaaatagtc

SEQ ID NO: 354 - DNA, 624 bp, Artificial
  Modified tetracycline repressor
atgtctagattagataaaagtaaagtgattaacagcgcattagagctgggtaatgaggtcggaatggaaggtttaacaacccgtaaactcgcccagaagcttggtgtagagcagcctacattgtattggcatgtaaaaaataagcgggccctactggatgcgctggcggtggagatcttggcgcgtcatcatgattattcactgcctgcggcgggggaatcctggcagtcatttctgcgcaataatgcaatgagtttccgccgcgcgctgctgcgttaccgtgacggggcaaaagtgcacctcggcacgcgtcctgatgaaaaacagtatgatacggtggaaacccagttacgctttatgacagaaaacggcttttcactgcgcgacgggttatatgcgatttcagcggtcagtcattttaccttaggtgccgtactggagcagcaggagcatactgccgccctgaccgaccgccctgcagcaccggacgaaaacctgccgccgctattgcgggaagcgctgcagattatggacagtgatgatggtgagcaggcctttctgcatggcctggagagcctgatccgggggtttgaggtgcagcttacggcactgttgcaaatagtc

SEQ ID NO: 355 - DNA, 624 bp, Artificial
  Modified tetracycline repressor
atgtctagattagataaaagtaaagtgattaacagcgcattagagctgcttaatgagggcgcaattggaggtttaacaacccgtaaactcgcccagaagcttggtgtagagcagcctacattgtattggcatgtaaaaaataagcgggccctactggatgcgctggcggtggagatcttggcgcgtcatcatgattattcactgcctgcggcgggggaatcctggcagtcatttctgcgcaataatgcaatgagtttccgccgcgcgctgctgcgttaccgtgacggggcaaaagtgcacctcggcacgcgtcctgatgaaaaacagtatgatacggtggaaacccagttacgctttatgacagaaaacggcttttcactgcgcgacgggttatatgcgatttcagcggtcagtcattttaccttaggtgccgtactggagcagcaggagcatactgccgccctgaccgaccgccctgcagcaccggacgaaaacctgccgccgctattgcgggaagcgctgcagattatggacagtgatgatggtgagcaggcctttctgcatggcctggagagcctgatccgggggtttgaggtgcagcttacggcactgttgcaaatagtc

SEQ ID NO: 356 - DNA, 624 bp, Artificial
  Modified tetracycline repressor
atgtctagattagataaaagtaaagtgattaacagcgctttagagctgcttaatgagggccgaaacgaaggattaacaacccgtaaactcgcccagaagcttggtgtagagcagcctacattgtattggcatgtaaaaaataagcgggccctactggatgcgctggcggtggagatcttggcgcgtcatcatgattattcactgcctgcggcgggggaatcctggcagtcatttctgcgcaataatgcaatgagtttccgccgcgcgctgctgcgttaccgtgacggggcaaaagtgcacctcggcacgcgtcctgatgaaaaacagtatgatacggtggaaacccagttacgctttatgacagaaaacggcttttcactgcgcgacgggttatatgcgatttcagcggtcagtcattttaccttaggtgccgtactggagcagcaggagcatactgccgccctgaccgaccgccctgcagcaccggacgaaaacctgccgccgctattgcgggaagcgctgcagattatggacagtgatgatggtgagcaggcctttctgcatggcctggagagcctgatccgggggtttgaggtgcagcttacggcactgttgcaaatagtc

SEQ ID NO: 357 - DNA, 624 bp, Artificial
  Modified tetracycline repressor
atgtctagattagataaaagtaaagtgattaacagcgcattagagctgcttatagggggcggaatcgtcggtttaacaacccgtaaactcgcccagaagcttggtgtagagcagcctacattgtattggcatgtaaaaaataagcgggccctactggatgcgctggcggtggagatcttggcgcgtcatcatgattattcactgcctgcggcgggggaatcctggcagtcatttctgcgcaataatgcaatgagtttccgccgcgcgctgctgcgttaccgtgacggggcaaaagtgcacctcggcacgcgtcctgatgaaaaacagtatgatacggtggaaacccagttacgctttatgacagaaaacggcttttcactgcgcgacgggttatatgcgatttcagcggtcagtcattttaccttaggtgccgtactggagcagcaggagcatactgccgccctgaccgaccgccctgcagcaccggacgaaaacctgccgccgctattgcgggaagcgctgcagattatggacagtgatgatggtgagcaggcctttctgcatggcctggagagcctgatccgggggtttgaggtgcagcttacggcactgttgcaaatagtc

SEQ ID NO: 358 - DNA, 624 bp, Artificial; identical to SEQ ID NO: 350
  Modified tetracycline repressor

SEQ ID NO: 359 - DNA, 624 bp, Artificial
  Modified tetracycline repressor
atgtctagattagataaaagtaaagtgattaacagcgcattagagctgctcgatgagcgcggaaacgaaggtttaacaacccgtaaactcgcccagaagcttggtgtagagcagcctacattgtattggcatgtaaaaaataagcgggccctactggatgcgctggcggtggagatcttggcgcgtcatcatgattattcactgcctgcggcgggggaatcctggcagtcatttctgcgcaataatgcaatgagtttccgccgcgcgctgctgcgttaccgtgacggggcaaaagtgcacctcggcacgcgtcctgatgaaaaacagtatgatacggtggaaacccagttacgctttatgacagaaaacggcttttcactgcgcgacgggttatatgcgatttcagcggtcagtcattttaccttaggtgccgtactggagcagcaggagcatactgccgccctgaccgaccgccctgcagcaccggacgaaaacctgccgccgctattgcgggaagcgctgcagattatggacagtgatgatggtgagcaggcctttctgcatggcctggagagcctgatccgggggtttgaggtgcagcttacggcactgttgcaaatagtc

SEQ ID NO: 360 - DNA, 624 bp, Artificial; identical to SEQ ID NO: 356
  Modified tetracycline repressor

SEQ ID NO: 361 - DNA, 624 bp, Artificial
  Modified tetracycline repressor
atgtctagattagataaaagtaaagtgattaacagcgcattagagctgctttatgaggacggaaccgaaggtttaacaacccgtaaactcgcccagaagcttggtgtagagcagcctacattgtattcgcatgtaaaaaataagcgggccctactggatgcgctggcggtggagatcttggcgcgtcatcatgattattcactgcctgcggcgggggaatcctggcagtcatttctgcgcaataatgcaatgagtttccgccgcgcgctgctgcgttaccgtgacggggcaaaagtgcacctcggcacgcgtcctgatgaaaaacagtatgatacggtggaaacccagttacgctttatgacagaaaacggcttttcactgcgcgacgggttatatgcgatttcagcggtcagtcattttaccttaggtgccgtactggagcagcaggagcatactgccgccctgaccgaccgccctgcagcaccggacgaaaacctgccgccgctattgcgggaagcgctgcagattatggacagtgatgatggtgagcaggcctttctgcatggcctggagagcctgatccgggggtttgaggtgcagcttacggcactgttgcaaatagtc

SEQ ID NO: 362 - DNA, 624 bp, Artificial
  Modified tetracycline repressor
atgtctagattagataaaagtaaagtgattaacagcgcattagagctgctttatgacgtcggaaccgaaggtttaacaacccgtaaactcgcccagaagcttggtgtagagcagcctacattgtattggcatgtaaaaaataagcgggccctactggatgcgctggcggtggagatcttggcgcgtcatcatgattattcactgcctgcggcgggggaatcctggcagtcatttctgcgcaataatgcaatgagtttccgccgcgcgctgctgcgttaccgtgacggggcaaaagtgcacctcggcacgcgtcctgatgaaaaacagtatgatacggtggaaacccagttacgctttatgacagaaaacggcttttcactgcgcgacgggttatatgcgatttcagcggtcagtcattttaccttaggtgccgtactggagcagcaggagcatactgccgccctgaccgaccgccctgcagcaccggacgaaaacctgccgccgctattgcgggaagcgctgcagattatggacagtgatgatggtgagcaggcctttctgcatggcctggagagcctgatccgggggtttgaggtgcagcttacggcactgttgcaaatagtc

SEQ ID NO: 363 - DNA, 624 bp, Artificial
  Modified tetracycline repressor
atgtctagattagataaaagtaaagtgattaacagcgcattagagctggtttatgaggtcgggaccgaaggtttaacaacccgtaaactcgcccagaagcttggtgtagagcagcctacattgtattggcatgtaaaaaataagcgggccctactggatgcgctggcggtggagatcttggcgcgtcatcatgattattcactgcctgcggcgggggaatcctggcagtcatttctgcgcaataatgcaatgagtttccgccgcgcgctgctgcgttaccgtgacggggcaaaagtgcacctcggcacgcgtcctgatgaaaaacagtatgatacggtggaaacccagttacgctttatgacagaaaacggcttttcactgcgcgacgggttatatgcgatttcagcggtcagtcattttaccttaggtgccgtactggagcagcaggagcatactgccgccctgaccgaccgccctgcagcaccggacgaaaacctgccgccgctattgcgggaagcgctgcagattatggacagtgatgatggtgagcaggcctttctgcatggcctggagagcctgatccgggggtttgaggtgcagcttacggcactgttgcaaatagtc

SEQ ID NO: 364 - DNA, 624 bp, Artificial
  Modified tetracycline repressor
atgtctagattagataaaagtaaagtgattaacagcgcattagagctgtccaatgaggtcggaatcgatggtttaacaacccgtaaactcgcccagaagcttggtgtagagcagcctacattgtattggcatgtaaaaaataagcgggccctactggatgcgctggcggtggagatcttggcgcgtcatcatgattattcactgcctgcggcgggggaatcctggcagtcatttctgcgcaataatgcaatgagtttccgccgcgcgctgctgcgttaccgtgacggggcaaaagtgcacctcggcacgcgtcctgatgaaaaacagtatgatacggtggaaacccagttacgctttatgacagaaaacggcttttcactgcgcgacgggttatatgcgatttcagcggtcagtcattttaccttaggtgccgtactggagcagcaggagcatactgccgccctgaccgaccgccctgcagcaccggacgaaaacctgccgccgctattgcgggaagcgctgcagattatggacagtgatgatggtgagcaggcctttctgcatggcctggagagcctgatccgggggtttgaggtgcagcttacggcactgttgcaaatagtc

SEQ ID NO: 365 - DNA, 624 bp, Artificial
  Modified tetracycline repressor
atgtctagattagataaaagtaaagtgattaacagcgcattagtgctgttttatgaggtcggaatgaaaggtttaacaacccgtaaactcgcccagaagcttggtgtagagcagcctacattgtattggcatgtaaaaaataagcgggccctactggatgcgctggcggtggagatcttggcgcgtcatcatgattattcactgcctgcggcgggggaatcctggcagtcatttctgcgcaataatgcaatgagtttccgccgcgcgctgctgcgttaccgtgacggggcaaaagtgcacctcggcacgcgtcctgatgaaaaacagtatgatacggtggaaacccagttacgctttatgacagaaaacggcttttcactgcgcgacgggttatatgcgatttcagcggtcagtcattttaccttaggtgccgtactggagcagcaggagcatactgccgccctgaccgaccgccctgcagcaccggacgaaaacctgccgccgctattgcgggaagcgctgcagattatggacagtgatgatggtgagcaggcctttctgcatggcctggagagcctgatccgggggtttgaggtgcagcttacggcactgttgcaaatagtc

SEQ ID NO: 366 - DNA, 615 bp, Artificial
  Modified tetracycline repressor
atgtctagattagataaaagtaaagtgattaacagcgcattagagctgcttaatgaggtctcgttaacaacccgtaaactcgcccagaagcttggtgtagagcagcctacattgtattggcatgtaaaaaataagcgggccctactggatgcgctggcggtggagatcttggcgcgtcatcatgattattcactgcctgcggcgggggaatcctggcagtcatttctgcgcaataatgcaatgagtttccgccgcgcgctgctgcgttaccgtgacggggcaaaagtgcacctcggcacgcgtcctgatgaaaaacagtatgatacggtggaaacccagttacgctttatgacagaaaacggcttttcactgcgcgacgggttatatgcgatttcagcggtcagtcattttaccttaggtgccgtactggagcagcaggagcatactgccgccctgaccgaccgccctgcagcaccggacgaaaacctgccgccgctattgcgggaagcgctgcagattatggacagtgatgatggtgagcaggcctttctgcatggcctggagagcctgatccgggggtttgaggtgcagcttacggcactgttgcaaatagtc

SEQ ID NO: 367 - DNA, 624 bp, Artificial
  Modified tetracycline repressor
atgtctagattagataaaagtaaagtgattaacagcgcagaagagctgcttaatgagggcggaatcgaaggtttaacaacccgtaaactcgcccagaagcttggtgtagagcagcctacattgtattggcatgtaaaaaataagcgggccctactggatgcgctggcggtggagatcttggcgcgtcatcatgattattcactgcctgcggcgggggaatcctggcagtcatttctgcgcaataatgcaatgagtttccgccgcgcgctgctgcgttaccgtgacggggcaaaagtgcacctcggcacgcgtcctgatgaaaaacagtatgatacggtggaaacccagttacgctttatgacagaaaacggcttttcactgcgcgacgggttatatgcgatttcagcggtcagtcattttaccttaggtgccgtactggagcagcaggagcatactgccgccctgaccgaccgccctgcagcaccggacgaaaacctgccgccgctattgcgggaagcgctgcagattatggacagtgatgatggtgagcaggcctttctgcatggcctggagagcctgatccgggggtttgaggtgcagcttacggcactgttgcaaatagtc

SEQ ID NO: 368 - DNA, 624 bp, Artificial
  Modified tetracycline repressor
atgtctagattagataaaagtaaagtgattaacagcgcagaagagctgtctaatgagggcggaatcgacggtttaacaacccgtaaactcgcccagaagcttggtgtagagcagcctacattgtattggcatgtaaaaaataagcgggccctactggatgcgctggcggtggagatcttggcgcgtcatcatgattattcactgcctgcggcgggggaatcctggcagtcatttctgcgcaataatgcaatgagtttccgccgcgcgctgctgcgttaccgtgacggggcaaaagtgcacctcggcacgcgtcctgatgaaaaacagtatgatacggtggaaacccagttacgctttatgacagaaaacggcttttcactgcgcgacgggttatatgcgatttcagcggtcagtcattttaccttaggtgccgtactggagcagcaggagcatactgccgccctgaccgaccgccctgcagcaccggacgaaaacctgccgccgctattgcgggaagcgctgcagattatggacagtgatgatggtgagcaggcctttctgcatggcctggagagcctgatccgggggtttgaggtgcagcttacggcactgttgcaaatagtc

SEQ ID NO: 369 - DNA, 624 bp, Artificial
  Modified tetracycline repressor
atgtctagattagataaaagtaaagtgattaacagcgcattagatctgcttaatgaggtcggaatcgaaggtttaacaacccgtaaactcgcccagaagcttggtgtagagcagcctacattgtattggcatgtaaaaaataagcgggccctactggatgcgctggcggtggagatcttggcgcgtcatcatgattattcactgcctgcggcgggggaatcctggcagtcatttctgcgcaataatgcaatgagtttccgccgcgcgctgctgcgttaccgtgacagggcaaaagtgcacctcggcacgcgtcctgatgaaaaacagtatgatacggtggaaacccagttacgctttatgacagaaaacggcttttcactgcgcgacgggttatatgcgatttcagcggtcagtcattttaccttaggtgccgtactggagcagcaggagcatactgccgccctgaccgaccgccctgcagcaccggacgaaaacctgccgccgctattgcgggaagcgctgcagattatggacagtgatgatggtgagcaggcctttctgcatggcctggagagcctgatccgggggtttgaggtgcagcttacggcactgttgcaaatagtc

SEQ ID NO: 370 - DNA, 624 bp, Artificial; identical to SEQ ID NO: 356
  Modified tetracycline repressor

SEQ ID NO: 371 - DNA, 624 bp, Artificial
  Modified tetracycline repressor
atgtctagattagataaaagtaaagtgattaacagcgcagtagagctggttaaagaggtaggaatcgaaggattaacaacccgtaaactcgcccagaagcttggtgtagagcagcctacattgtattggcatgtaaaaaataagcgggccctactggatgcgctggcggtggagatcttggcgcgtcatcatgattattcactgcctgcggcgggggaatcctggcagtcatttctgcgcaataatgcaatgagtttccgccgcgcgctgctgcgttaccgtgacggggcaaaagtgcacctcggcacgcgtcctgatgaaaaacagtatgatacggtggaaacccagttacgctttatgacagaaaacggcttttcactgcgcgacgggttatatgcgatttcagcggtcagtcattttaccttaggtgccgtactggagcagcaggagcatactgccgccctgaccgaccgccctgcagcaccggacgaaaacctgccgccgctattgcgggaagcgctgcagattatggacagtgatgatggtgagcaggcctttctgcatggcctggagagcctgatccgggggtttgaggtgcagcttacggcactgttgcaaatagtc

SEQ ID NO: 372 - DNA, 624 bp, Artificial
  Modified tetracycline repressor
atgtctagattagataaaagtaaagtgattaacagcgcattagagctgctttatgaggtcggaatcgaaggtttaacaacccgtaaactcgcccagaagcttggtgtagagcagcctacattgtattggcatgtaaaaaataagcgggccctactctatgccctggcggtggagaccttggcgcgtcatcatgattattcactgcctgcggcgggggaatcctggcagtcatttctgcgcaataatgcaatgagtttccgccgcgcgctgctgcgttaccgtgacggggcaaaagtgcacctcggcacgcgtcctgatgaaaaacagtatgatacggtggaaacccagttacgctttatgacagaaaacggcttttcactgcgcgacgggttatatgcgatttcagcggtcagtcattttaccttaggtgccgtactggagcagcaggagcatactgccgccctgaccgaccgccctgcagcaccggacgaaaacctgccgccgctattgcgggaagcgctgcagattatggacagtgatgatggtgagcaggcctttctgcatggcctggagagcctgatccgggggtttgaggtgcagcttacggcactgttgcaaatagtc

SEQ ID NO: 373 - DNA, 624 bp, Artificial
  Modified tetracycline repressor
atgtctagattagataaaagtaaagtgattaacagcgcattagagctgctttatgaggtcggaatcgtaggtttaacaacccgtaaactcgcccagaagcttggtgtagagcagcctacattgtattggcatgtaaaaaataagcgggccctactggcttcgctttcggtggagatcttgacgcgttaccatgattattcactgcctgcggcgggggaatcctggcagtcatttctgcgcaataatgcaatgagtttccgccgcgcgctgctgcgttaccgtgacggggcaaaagtgcacctcggcacgcgtcctgatgaaaaacagtatgatacggtggaaacccagttacgctttatgacagaaaacggcttttcactgcgcgacgggttatatgcgatttcagcggtcagtcattttaccttaggtgccgtactggagcagcaggagcatactgccgccctgaccgaccgccctgcagcaccggacgaaaacctgccgccgctattgcgggaagcgctgcagattatggacagtgatgatggtgagcaggcctttctgcatggcctggagagcctgatccgggggtttgaggtgcagcttacggcactgttgcaaatagtc

SEQ ID NO: 374 - DNA, 624 bp, Artificial; identical to SEQ ID NO: 309
  Modified tetracycline repressor

SEQ ID NO: 375 - DNA, 624 bp, Artificial
  Modified tetracycline repressor
atgtctagattagataaaagtaaagtgattaacagcgcattagagctgcttaatgaggtcggaatcgaaggcttaacaacccgtaaactcgcccagaagcttggtgtagagcagcctacattgtattggcatgtaaaaaataagcgggccctactggatgcgctggcggtggagatcttggcgcgtcatcatgattattcactgcctgcggcgggggaatcctggcagtcatttctgcgcaataatgcaatgagtttccgccgcgcgctgctgcgtaaccgtgacggggcaaaagtgcacttcgacacgcgtcctgatgaaaaacagtatgatacggtggaaacccagttacgctttatgacagaaaacggcttttcactgcgcgacgggttatatgcgatttcagcggtcagtcattttaccttaggtgccgtactggagcagcaggagcatactgccgccctgaccgaccgccctgcagcaccggacgaaaacctgccgccgctattgcgggaagcgctgcagattatggacagtgatgatggtgagcaggcctttctgcatggcctggagagcctgatccgggggtttgaggtgcagcttacggcactgttgcaaatagtc

SEQ ID NO: 376 - DNA, 624 bp, Artificial
  Modified tetracycline repressor
atgtctagattagataaaagtaaagtgattaacagcgcaatagagctgcttaatgaggtaggactcgaaggtttaacaacccgtaaactcgcccagaagcttggtgtagagcagcctacattgtattggcatgtaaaaaataagcgggccctactggatgcgctggcggtggagatcttggcgcgtcatcatgattattcactgcctgcggcgggggaatcctggcagtcatttctgcgcaataatgcaatgagtttccgccgcgcgctgctgcgttaccatgacggggcgaaagagcacctcggcacgcgtcctgatgaaaaacagtatgatacggtggaaacccagttacgctttatgacagaaaacggcttttcactgcgcgacgggttatatgcgatttcagcggtcagtcattttaccttaggtgccgtactggagcagcaggagcatactgccgccctgaccgaccgccctgcagcaccggacgaaaacctgccgccgctattgcgggaagcgctgcagattatggacagtgatgatggtgagcaggcctttctgcatggcctggagagcctgatccgggggtttgaggtgcagcttacggcactgttgcaaatagtc

SEQ ID NO: 377 - DNA, 624 bp, Artificial
  Modified tetracycline repressor
atgtctagattagataaaagtaaagtgattaacagcgcacgagagctgcttaatgaagtcggaatcgaaggtttaacaacccgtaaactcgcccagaagcttggtgtagagcagcctacattgtattggcatgtaaaaaataagcgggccctactggatgcgctggcggtggagatcttggcgcgtcatcatgattattcactgcctgcggcgggggaatcctggcagtcatttctgcgcaataatgcaatgagtttccgccgcgcgctgctgcgttaccgtcacggggcaaaagtgcaccccggcacgcgtcctgatgaaaaacagtatgatacggtggaaacccagttacgctttatgacagaaaacggcttttcactgcgcgacgggttatatgcgatttcagcggtcagtcattttaccttaggtgccgtactggagcagcaggagcatactgccgccctgaccgaccgccctgcagcaccggacgaaaacctgccgccgctattgcgggaagcgctgcagattatggacagtgatgatggtgagcaggcctttctgcatggcctggagagcctgatccgggggtttgaggtgcagcttacggcactgttgcaaatagtc

SEQ ID NO: 378 - DNA, 624 bp, Artificial
  Modified tetracycline repressor
atgtctagattagataaaagtaaagtgattaacagcgcattagagctgtttcgtgaggtcggaatcgaaggtttaacaacccgtaaactcgcccagaagcttggtgtagagcagcctacattgtattggcatgtaaaaaataagcgggccctactgaatgcgctggcggtggagatgttgacgcgtcatcatgattattcactgcctgcggcgggggaatcctggcagtcatttctgcgcaataatgcaatgagtttccgccgcgcgctgctgcgttaccgtgacggggcaaaagtgcacctcggcacgcgtcctgatgaaaaacagtatgatacggtggaaacccagttacgctttatgacagaaaacggcttttcactgcgcgacgggttatatgcgatttcagcggtcagtcattttaccttaggtgccgtactggagcagcaggagcatactgccgccctgaccgaccgccctgcagcaccggacgaaaacctgccgccgctattgcgggaagcgctgcagattatggacagtgatgatggtgagcaggcctttctgcatggcctggagagcctgatccgggggtttgaggtgcagcttacggcactgttgcaaatagtc

SEQ ID NO: 379 - DNA, 624 bp, Artificial
  Modified tetracycline repressor
atgtctagattagataaaagtaaagtgattaacagcgcattagagctgctttatgaggtcgaaatcaaaggtttaacaacccgtaaactcgcccagaagcttggtgtagagcagcctacattgtattggcatgtaaaaaataagcgggccctactggatgcgctggcggtggagatcttggcgcgtcatcatgattattcactgcctgcggcgggggaatcctggcagtcatttctgcgcaataatgcaatgagtttccgccgcgcgctgctgcgttaccgtgacggggcaaaagtgcacctcggcacgcgtcctgatgaaaaacagtatgatacggtggaaacccagttacgctttatgacagaaaacggcttttcactgcgcgacgggttatatgcgatttcagcggtcagtcattttaccttaggtgccgtactggagcagcaggagcatactgccgccctgaccgaccgccctgcagcaccggacgaaaacctgccgccgctattgcgggaagcgctgcagattatggacagtgatgatggtgagcaggcctttctgcatggcctggagagcctgatccgggggtttgaggtgcagcttacggcactgttgcaaatagtc

SEQ ID NO: 380 - DNA, 624 bp, Artificial
  Modified tetracycline repressor
atgtctagattagataaaagtaaagtgattaacagcgcattagagctgcttaatgaggtcggaatccacggtttaacaacccgtaaactcgcccagaagcttggtgtagagcagcctacattgtattggcatgtaaaaaataagcgggccctactgtatgcgctggccgtgcagaccttggcgcgtcatcatgattattcactgcctgcggcgggggaatcctggcagtcatttctgcgcaataatgcaatgagtttccgccgcgcgctgctgcgttaccgtgacggggcaaaagtgcacctcggcacgcgtcctgatgaaaaacagtatgatacggtggaaacccagttacgctttatgacagaaaacggcttttcactgcgcgacgggttatatgcgatttcagcggtcagtcattttaccttaggtgccgtactggagcagcaggagcatactgccgccctgaccgaccgccctgcagcaccggacgaaaacctgccgccgctattgcgggaagcgctgcagattatggacagtgatgatggtgagcaggcctttctgcatggcctggagagcctgatccgggggtttgaggtgcagcttacggcactgttgcaaatagtc

SEQ ID NO: 381 - DNA, 624 bp, Artificial
  Modified tetracycline repressor
atgtctagattagataaaagtaaagtgattaacagcgcattagagctgcttaatgatgaaggaatcaaaggtttaacaacccgtaaactcgcccagaagcttggtgtagagcagcctacattgtattggcatgtaaaaaataagcgggccctactggatgcgctggcgctggagaacttcgcgcgtcatcatgattattcactgcctgcggcgggggaatcctggcagtcatttctgcgcaataatgcaatgagtttccgccgcgcgctgctgcgttaccgtgacggggcaaaagtgcacctcggcacgcgtcctgatgaaaaacagtatgatacggtggaaacccagttacgctttatgacagaaaacggcttttcactgcgcgacgggttatatgcgatttcagcggtcagtcattttaccttaggtgccgtactggagcagcaggagcatactgccgccctgaccgaccgccctgcagcaccggacgaaaacctgccgccgctattgcgggaagcgctgcagattatggacagtgatgatggtgagcaggcctttctgcatggcctggagagcctgatccgggggtttgaggtgcagcttacggcactgttgcaaatagtc

SEQ ID NO: 382 - DNA, 624 bp, Artificial
  Modified tetracycline repressor
atgtctagattagataaaagtaaagtgattaacagcgcaatagagctgcttaatgaggtcagaatcgaaggtttaacaacccgtaaactcgcccagaagcttggtgtagagcagcctacattgtattggcatgtaaaaaataagcgggccctactggatgcgctggtgctggagatcttggcgcgtcatcatgattattcactgcctgcggcgggggaatcctggcagtcatttctgcgcaataatgcaatgagtttccgccgcgcgctgctgcgttaccgtgacggggcaaaagtgcacctcggcacgcgtcctgatgaaaaacagtatgatacggtggaaacccagttacgctttatgacagaaaacggcttttcactgcgcgacgggttatatgcgatttcagcggtcagtcattttaccttaggtgccgtactggagcagcaggagcatactgccgccctgaccgaccgccctgcagcaccggacgaaaacctgccgccgctattgcgggaagcgctgcagattatggacagtgatgatggtgagcaggcctttctgcatggcctggagagcctgatccgggggtttgaggtgcagcttacggcactgttgcaaatagtc

SEQ ID NO: 383 - DNA, 624 bp, Artificial
  Modified tetracycline repressor
atgtctagattagataaaagtaaagtgattaacagcgcattagagctgcttaatgaggtcggaatcgaagggttaacaacccgtaaactcgcccagaagcttggtgtagagcagcctacattgtattggcatgtaaaaaataagcgggccctactggatgcgctggcggtggagatcttggcgcgtcatcatgattattcactgcctgcggcgggggaatcctggcagtcatttctgcgcaataatgcaatgagtttccgccgcgcgctgctgcgttaccgtgccagggcaaaagtgcacctcggcacgcgtcctgatgaaaaacagtatgatacggtggaaacccagttacgctttatgacagaaaacggcttttcactgcgcgacgggttatatgcgatttcagcggtcagtcattttaccttaggtgccgtactggagcagcaggagcatactgccgccctgaccgaccgccctgcagcaccggacgaaaacctgccgccgctattgcgggaagcgctgcagattatggacagtgatgatggtgagcaggcctttctgcatggcctggagagcctgatccgggggtttgaggtgcagcttacggcactgttgcaaatagtc

SEQ ID NO: 384 - DNA, 624 bp, Artificial
  Modified tetracycline repressor
atgtctagattagataaaagtaaagtgattaacagcgcattagagctgcttaaagaggtcggaatcgaaggtttaacaacccgtaaactcgcccagaagcttggtgtagagcagcctacattgtattggcatgtaaaaaataagcgggccctactggatgcgctggcggtggagatcttggcgcgtcatcatgattattcactgcctgcggcgggggaatcctggcagtcatttctgcgcaataatgcaatgagtttccgccgcgcgctgctgcgttaccgtgtcgtggtaaaagtgcacctcggcacgcgtcctgatgaaaaacagtatgatacggtggaaacccagttacgctttatgacagaaaacggcttttcactgcgcgacgggttatatgcgatttcagcggtcagtcattttaccttaggtgccgtactggagcagcaggagcatactgccgccctgaccgaccgccctgcagcaccggacgaaaacctgccgccgctattgcgggaagcgctgcagattatggacagtgatgatggtgagcaggcctttctgcatggcctggagagcctgatccgggggtttgaggtgcagcttacggcactgttgcaaatagtc

SEQ ID NO: 385 - DNA, 624 bp, Artificial
  Modified tetracycline repressor
atgtctagattagataaaagtaaagtgattaacagcgcagtagagctgcttaatgaggtcggaatcgaaggcttaacaacccgtaaactcgcccagaagcttggtgtagagcagcctacattgtattggcatgtaaaaaataagcgggccctactggatgcgctggcggtggagatcttggcgcgtcatcatgattattcactgcctgcggcgggggaatcctggcagtcatttctgcgcaataatgcaatgagtttccgccgcgcgctgctgcgtgacggtggcggggcaaaagtgcacctcggcacgcgtcctgatgaaaaacagtatgatacggtggaaacccagttacgctttatgacagaaaacggcttttcactgcgcgacgggttatatgcgatttcagcggtcagtcattttaccttaggtgccgtactggagcagcaggagcatactgccgccctgaccgaccgccctgcagcaccggacgaaaacctgccgccgctattgcgggaagcgctgcagattatggacagtgatgatggtgagcaggcctttctgcatggcctggagagcctgatccgggggtttgaggtgcagcttacggcactgttgcaaatagtc

SEQ ID NO: 386 - DNA, 624 bp, Artificial
  Modified tetracycline repressor
atgtctagattagataaaagtaaagtgattaacagcgcattagagctgcttaatgaggtcggaatcgaaggtttaacaacccgtaaactcgcccagaagcttggtgtagagcagcctacattgtattggcatgtaaaaaataagcgggccctactggatgcgctgccggtgcatatcttggctcgttaccatgattattcactgcctgcggcgggggaatcctggcagtcatttctgcgcaataatgcaatgagtttccgccgcgcgctgctgcgttaccgtgacggggcaaaagtgcacctcggcacgcgtcctgatgaaaaacagtatgatacggtggaaacccagttacgctttatgacagaaaacggcttttcactgcgcgacgggttatatgcgatttcagcggtcagtcattttaccttaggtgccgtactggagcagcaggagcatactgccgccctgaccgaccgccctgcagcaccggacgaaaacctgccgccgctattgcgggaagcgctgcagattatggacagtgatgatggtgagcaggcctttctgcatggcctggagagcctgatccgggggtttgaggtgcagcttacggcactgttgcaaatagtc

SEQ ID NO: 387 - DNA, 615 bp, Artificial
  Modified tetracycline repressor
atgtctagattagataaaagtaaagtgattaacagcgcattagagctgcttaatgaggtcagtttaacaacccgtaaactcgcccagaagcttggtgtagagcagcctacattgtattggcatgtaaaaaataagcgggccctactggatgcgctggcggtggagatcttggcgcgtcatcatgattattcactgcctgcggcgggggaatcctggcagtcatttctgcgcaataatgcaatgagtttccgccgcgcgctgctgcgttaccgtgacggggcaaaagtgcacctcggcacgcgtcctgatgaaaaacagtatgatacggtggaaacccagttacgctttatgacagaaaacggcttttcactgcgcgacgggttatatgcgatttcagcggtcagtcattttaccttaggtgccgtactggagcagcaggagcatactgccgccctgaccgaccgccctgcagcaccggacgaaaacctgccgccgctattgcgggaagcgctgcagattatggacagtgatgatggtgagcaggcctttctgcatggcctggagagcctgatccgggggtttgaggtgcagcttacggcactgttgcaaatagtc

SEQ ID NO: 388 - DNA, 624 bp, Artificial
  Modified tetracycline repressor
atgtctagattagataaaagtaaagtgattaacagcgcattagagctgcttaatgaggtcggaatcgaaggtttaacaacccgtaaactcgcccagaagcttggtgtagagcagcctacattgtattggcatgtaaaaaataagcgggccctactggatgcgctggcggtggagatcttggcgcgtcatcatgattattcactgcctgcggcgggggaatcctggcagtcatttctgcgcaataatgcaatgagtttccgccgcgcgctgctgcgttgccgtgaagggacaaaagtgcacctcggcacgcgtcctgatgaaaaacagtatgatacggtggaaacccagttacgctttatgacagaaaacggcttttcactgcgcgacgggttatatgcgatttcagcggtcagtcattttaccttaggtgccgtactggagcagcaggagcatactgccgccctgaccgaccgccctgcagcaccggacgaaaacctgccgccgctattgcgggaagcgctgcagattatggacagtgatgatggtgagcaggcctttctgcatggcctggagagcctgatccgggggtttgaggtgcagcttacggcactgttgcaaatagtc

SEQ ID NO: 389 - DNA, 624 bp, Artificial
  Modified tetracycline repressor
atgtctagattagataaaagtaaagtgattaacagcgcatttgaactgcttaatgaggtcggaatcgaaggtttaacaacccgtaaactcgcccagaagcttggtgtagagcagcctacattgtattggcatgtaaaaaataagcgggccctactggatgcgctggcggtggagatcttggcgcgtcatcatgattattcactgcctgcggcgggggaatcctggcagtcatttctgcgcaataatgcaatgagtttccgccgcgcgctgctgcgttaccgtgacgtggcagaactacaccccggcacgcgtcctgatgaaaaacagtatgatacggtggaaacccagttacgctttatgacagaaaacggcttttcactgcgcgacgggttatatgcgatttcagcggtcagtcattttaccttaggtgccgtactggagcagcaggagcatactgccgccctgaccgaccgccctgcagcaccggacgaaaacctgccgccgctattgcgggaagcgctgcagattatggacagtgatgatggtgagcaggcctttctgcatggcctggagagcctgatccgggggtttgaggtgcagcttacggcactgttgcaaatagtc

SEQ ID NO: 390 - DNA, 624 bp, Artificial
  Modified tetracycline repressor
atgtctagattagataaaagtaaagtgattaacagcgcattagagctgcttaatgaggtcggaatcgaaggtttaacaacccgtaaactcgcccagaagcttggtgtagagcagcctacattgtattggcatgtaaaaaataagcgggccctactggatgcgctggcggtggagatcttggcgcgtcatcatgattattcactgcctgcggcgggggaatcctggcagtcatttctgcgcaataatgcaatgagtttccgccgcgcgctgctgcgttgccgtgaccgggcaaatgtgcacctcggcacgcgtcctgatgaaaaacagtatgatacggtggaaacccagttacgctttatgacagaaaacggcttttcactgcgcgacgggttatatgcgatttcagcggtcagtcattttaccttaggtgccgtactggagcagcaggagcatactgccgccctgaccgaccgccctgcagcaccggacgaaaacctgccgccgctattgcgggaagcgctgcagattatggacagtgatgatggtgagcaggcctttctgcatggcctggagagcctgatccgggggtttgaggtgcagcttacggcactgttgcaaatagtc

SEQ ID NO: 391 - DNA, 624 bp, Artificial
  Modified tetracycline repressor
atgtctagattagataaaagtaaagtgattaacagcgcagtagtgctgcttaatgaggtcggaatcgatggtttaacaacccgtaaactcgcccagaagcttggtgtagagcagcctacattgtattggcatgtaaaaaataaacgggccctactggatgcgctggcggtggagatcttggcgcgtcatcatgattattcactgcctgcggcgggggaatcctggcagtcatttctgcgcaataatgcaatgagtttccgccgcgcgctgctgcgttaccgtgacctggcaaaagtgcacctcgccacgcgtcctgatgaaaaacagtatgatacggtggaaacccagttacgctttatgacagaaaacggcttttcactgcgcgacgggttatatgcgatttcagcggtcagtcattttaccttaggtgccgtactggagcagcaggagcatactgccgccctgaccgaccgccctgcagcaccggacgaaaacctgccgccgctattgcgggaagcgctgcagattatggacagtgatgatggtgagcaggcctttctgcatggcctggagagcctgatccgggggtttgaggtgcagcttacggcactgttgcaaatagtc

SEQ ID NO: 392 - DNA, 624 bp, Artificial
  Modified tetracycline repressor
atgtctagattagataaaagtaaagtgattaacagcgcattagagctgctaaaggtggtcggaaccgaaggtttaacaacccgtaaactcgcccagaagcttggtgtagagcagcctacattgtattggcatgtaaaaaataagcgggccctactgtattcgctggcggtggagatcttggcgcgtcatcatgattattcactgcctgcggcgggggaatcctggcagtcatttctgcgcaataatgcaatgagtttccgccgcgcgctgctgcgttaccgtgacggggcaaaagtgcacctcggcacgcgtcctgatgaaaaacagtatgatacggtggaaacccagttacgctttatgacagaaaacggcttttcactgcgcgacgggttatatgcgatttcagcggtcagtcattttaccttaggtgccgtactggagcagcaggagcatactgccgccctgaccgaccgccctgcagcaccggacgaaaacctgccgccgctattgcgggaagcgctgcagattatggacagtgatgatggtgagcaggcctttctgcatggcctggagagcctgatccgggggtttgaggtgcagcttacggcactgttgcaaatagtc

SEQ ID NO: 393 - DNA, 624 bp, Artificial
  Modified tetracycline repressor
atgtctagattagataaaagtaaagtgattaacagcgcattagagctgcttaatgagggcggaatcgaaggtttaacaacccgtaaactcgcccagaagcttggtgtagagcagcctacattgtattggcatgtaaaaaataagcgggccctactggatgcgctgccggtggagctcttggcgcgccatcatgattattcactgcctgcggcgggggaatcctggcagtcatttctgcgcaataatgcaatgagtttccgccgcgcgctgctgcgttaccgtgacggggcaaaagtgcacctcggcacgcgtcctgatgaaaaacagtatgatacggtggaaacccagttacgctttatgacagaaaacggcttttcactgcgcgacgggttatatgcgatttcagcggtcagtcattttaccttaggtgccgtactggagcagcaggagcatactgccgccctgaccgaccgccctgcagcaccggacgaaaacctgccgccgctattgcgggaagcgctgcagattatggacagtgatgatggtgagcaggcctttctgcatggcctggagagcctgatccgggggtttgaggtgcagcttacggcactgttgcaaatagtc

SEQ ID NO: 394 - DNA, 624 bp, Artificial
  Modified tetracycline repressor
atgtctagattagataaaagtaaagtgattaacagcgcattagagctgatgaatgatgtcggaatcgaaggtttaacaacccgtaaactcgcccagaagcttggtgtagagcagcctacattgtattggcatgtaaaaaataagcgggccctactatacgctctggaggtggagatcttggcgcgtcatcatgattattcactgcctgcggcgggggaatcctggcagtcatttctgcgcaataatgcaatgagtttccgccgcgcgctgctgcgttaccgtgacggggcaaaagtgcacctcggcacgcgtcctgatgaaaaacagtatgatacggtggaaacccagttacgctttatgacagaaaacggcttttcactgcgcgacgggttatatgcgatttcagcggtcagtcattttaccttaggtgccgtactggagcagcaggagcatactgccgccctgaccgaccgccctgcagcaccggacgaaaacctgccgccgctattgcgggaagcgctgcagattatggacagtgatgatggtgagcaggcctttctgcatggcctggagagcctgatccgggggtttgaggtgcagcttacggcactgttgcaaatagtc

SEQ ID NO: 395 - DNA, 624 bp, Artificial
  Modified tetracycline repressor
atgtctagattagataaaagtaaagtgattaacagcgcattagagcttcttaatgaggtcggaatcgaaggtttaacaacccgtaaactcgcccagaagcttggtgtagagcagcctacattgtattggcatgtaaaaaataagcgggccctactggatgcgctggctgagttaaacgtcgcgcgtcatcatgattattcactgcctgcggcgggggaatcctggcagtcatttctgcgcaataatgcaatgagtttccgccgcgcgctgctgcgttaccgtgacggggcaaaagtgcacctcggcacgcgtcctgatgaaaaacagtatgatacggtggaaacccagttacgctttatgacagaaaacggcttttcactgcgcgacgggttatatgcgatttcagcggtcagtcattttaccttaggtgccgtactggagcagcaggagcatactgccgccctgaccgaccgccctgcagcaccggacgaaaacctgccgccgctattgcgggaagcgctgcagattatggacagtgatgatggtgagcaggcctttctgcatggcctggagagcctgatccgggggtttgaggtgcagcttacggcactgttgcaaatagtc

SEQ ID NO: 396 - DNA, 624 bp, Artificial
  Modified tetracycline repressor
atgtctagattagataaaagtaaagtgattaacagcgcattggcgttggttaacgaggttggaatcgaaggtttaacaacccgtaaactcgcccagaagcttggtgtagagcagcctacattgtattggcatgtaaaaaataagcgggccctactggatgcgctggcggtggagatcttggcgcgtcatcatgattattcactgcctgcggcgggggaatcctggcagtcatttctgcgcaataatgcaatgagtttccgccgcgcgctgctgcgttaccgtgacgtagcaaaagtgcacctcggcacgcgtcctgatgaaaaacagtatgatacggtggaaacccagttacgctttatgacagaaaacggcttttcactgcgcgacgggttatatgcgatttcagcggtcagtcattttaccttaggtgccgtactggagcagcaggagcatactgccgccctgaccgaccgccctgcagcaccggacgaaaacctgccgccgctattgcgggaagcgctgcagattatggacagtgatgatggtgagcaggcctttctgcatggcctggagagcctgatccgggggtttgaggtgcagcttacggcactgttgcaaatagtc

SEQ ID NO: 397 - DNA, 624 bp, Artificial
  Modified tetracycline repressor
atgtctagattagataaaagtaaagtgattaacagcgcattagagctgcttaatgagggcggaaacgaaggtttaacaacccgtaaactcgcccagaagcttggtgtagagcagcctacattgtattggcatgtaaaaaataagcagaccctactggatgcgctggcggtggagatcttggcgcgtcatcatgattattcactgcctgcggcgggggaatcctggcagtcatttctgcgcaataatgcaatgagtttccgccgcgcgctgctgcgttaccgtgacggggcaaaagtgcacctcggcacgcgtcctgatgaaaaacagtatgatacggtggaaacccagttacgctttatgacagaaaacggcttttcactgcgcgacgggttatatgcgatttcagcggtcagtcattttaccttaggtgccgtactggagcagcaggagcatactgccgccctgaccgaccgccctgcagcaccggacgaaaacctgccgccgctattgcgggaagcgctgcagattatggacagtgatgatggtgagcaggcctttctgcatggcctggagagcctgatccgggggtttgaggtgcagcttacggcactgttgcaaatagtc

SEQ ID NO: 398 - DNA, 624 bp, Artificial
  Modified tetracycline repressor
atgtctagattagataaaagtaaagtgattaacagcgcattagagctgcttaatgtggtcggaatcgaaggtttaacaacccgtaaactcgcccagaagcttggtgtagagcagcctacattgtattggcatgtaaaaaataagcgggccctactggatgcgctggcggtggagatcttggcgcgtcatcatgattattcactgcctgcggcgggggaatcctggcagtcatttctgcgcaataatgcaatgagtttccgccgcgcgctgctgcgttgccgttacgggacaaacctgcacctgggcacgcgtcctgatgaaaaacagtatgatacggtggaaacccagttacgctttatgacagaaaacggcttttcactgcgcgacgggttatatgcgatttcagcggtcagtcattttaccttaggtgccgtactggagcagcaggagcatactgccgccctgaccgaccgccctgcagcaccggacgaaaacctgccgccgctattgcgggaagcgctgcagattatggacagtgatgatggtgagcaggcctttctgcatggcctggagagcctgatccgggggtttgaggtgcagcttacggcactgttgcaaatagtc

SEQ ID NO: 399 - DNA, 624 bp, Artificial
  Modified tetracycline repressor
atgtctagattagataaaagtaaagtgattaacagcgcattagagctgcttaatgagttcagaatcgaaggtttaacaacccgtaaactcgcccagaagcttggtgtagagcagcctacattgtattggcatgtaaaaaataagagtaccctactggatgcgctggcggtggagatcttggcgcgtcatcatgattattcactgcctgcggcgggggaatcctggcagtcatttctgcgcaataatgcaatgagtttccgccgcgcgctgctgcgttaccgtgacggggcaaaagtgcacctcggcacgcgtcctgatgaaaaacagtatgatacggtggaaacccagttacgctttatgacagaaaacggcttttcactgcgcgacgggttatatgcgatttcagcggtcagtcattttaccttaggtgccgtactggagcagcaggagcatactgccgccctgaccgaccgccctgcagcaccggacgaaaacctgccgccgctattgcgggaagcgctgcagattatggacagtgatgatggtgagcaggcctttctgcatggcctggagagcctgatccgggggtttgaggtgcagcttacggcactgttgcaaatagtc

SEQ ID NO: 400 - DNA, 624 bp, Artificial
  Modified tetracycline repressor
atgtctagattagataaaagtaaagtgattaacagcgcattacagctgctcaatgaggtcggaatcgaaggtttaacaacccgtaaactcgcccagaagcttggtgtagagcagcctacattgtattggcatgtaaaaaataagcgggccctactggatgcgatggcggtggagaggttggcgcgtcatcatgattattcactgcctgcggcgggggaatcctggcagtcatttctgcgcaataatgcaatgagtttccgccgcgcgctgctgcgttaccgtgacggggcaaaagtgcacctcggcacgcgtcctgatgaaaaacagtatgatacggtggaaacccagttacgctttatgacagaaaacggcttttcactgcgcgacgggttatatgcgatttcagcggtcagtcattttaccttaggtgccgtactggagcagcaggagcatactgccgccctgaccgaccgccctgcagcaccggacgaaaacctgccgccgctattgcgggaagcgctgcagattatggacagtgatgatggtgagcaggcctttctgcatggcctggagagcctgatccgggggtttgaggtgcagcttacggcactgttgcaaatagtc

SEQ ID NO: 401 - DNA, 624 bp, Artificial
  Modified tetracycline repressor
atgtctagattagataaaagtaaagtgattaacagcgcattagagctgctttatgaggtcggaatcgaaggcttaacaacccgtaaactcgcccagaagcttggtgtagagcagcctacattgtattggcatgtaaaaaataagcgggccctcctgtacgtgctggcggtggagatcttggcgcgtcatcatgattattcactgcctgcggcgggggaatcctggcagtcatttctgcgcaataatgcaatgagtttccgccgcgcgctgctgcgttaccgtgacggggcaaaagtgcacctcggcacgcgtcctgatgaaaaacagtatgatacggtggaaacccagttacgctttatgacagaaaacggcttttcactgcgcgacgggttatatgcgatttcagcggtcagtcattttaccttaggtgccgtactggagcagcaggagcatactgccgccctgaccgaccgccctgcagcaccggacgaaaacctgccgccgctattgcgggaagcgctgcagattatggacagtgatgatggtgagcaggcctttctgcatggcctggagagcctgatccgggggtttgaggtgcagcttacggcactgttgcaaatagtc

SEQ ID NO: 402 - DNA, 624 bp, Artificial; identical to SEQ ID NO: 385
  Modified tetracycline repressor

SEQ ID NO: 403 - DNA, 624 bp, Artificial
  Modified tetracycline repressor
atgtctagattagataaaagtaaagtgattaacagcgcattagagctgcttaatgaggtcggaatcaaaggtttaacaacccgtaaactcgcccagaagcttggtgtagagcagcctacattgtattggcatgtaaaaaataagcgggccctactggatgcgctggcggtggagatcttggcgcgtcatcatgattattcactgcctgcggcgggggaatcctggcagtcatttctgcgcaataatgcaatgagtttccgccgcgcgctgctgcgttaccgtcacggggcaaaagtgcaccacggcacgcgtcctgatgaaaaacagtatgatacggtggaaacccagttacgctttatgacagaaaacggcttttcactgcgcgacgggttatatgcgatttcagcggtcagtcattttaccttaggtgccgtactggagcagcaggagcatactgccgccctgaccgaccgccctgcagcaccggacgaaaacctgccgccgctattgcgggaagcgctgcagattatggacagtgatgatggtgagcaggcctttctgcatggcctggagagcctgatccgggggtttgaggtgcagcttacggcactgttgcaaatagtc

SEQ ID NO: 404 - DNA, 624 bp, Artificial
  Modified tetracycline repressor
atgtctagattagataaaagtaaagtgattaacagcgcattagagctgcataatgaggtcggattcgaaggtttaacaacccgtaaactcgcccagaagcttggtgtagagcagcctacattgtattggcatgtaaaaaataagcgggccctactggatgcgctggcggtggagatcttggcgcgtcatcatgattattcactgcctgcggcgggggaatcctggcagtcatttctgcgcaataatgcaatgagtttccgccgcgcgctgctgcgttaccgtgacgggccaaaagtgcacctcggcacgcgtcctgatgaaaaacagtatgatacggtggaaacccagttacgctttatgacagaaaacggcttttcactgcgcgacgggttatatgcgatttcagcggtcagtcattttaccttaggtgccgtactggagcagcaggagcatactgccgccctgaccgaccgccctgcagcaccggacgaaaacctgccgccgctattgcgggaagcgctgcagattatggacagtgatgatggtgagcaggcctttctgcatggcctggagagcctgatccgggggtttgaggtgcagcttacggcactgttgcaaatagtc

SEQ ID NO: 405 - DNA, 624 bp, Artificial
  Modified tetracycline repressor
atgtctagattagataaaagtaaagtgattaacagcgcattagtgctccttcatgatgacggaatcgaaggtttaacaacccgtaaactcgcccagaagcttggtgtagagcagcctacattgtattggcatgtaaaaaataagcgggccctactggatgcgctggcggtggagatcttggcgcgtcatcatgattattcactgcctgcggcgggggaatcctggcagtcatttctgcgcaataatgcaatgagtttccgccgcgcgctgctgcgttacccccacggggcaaaagtgaacctcggcacgcgtcctgatgaaaaacagtatgatacggtggaaacccagttacgctttatgacagaaaacggcttttcactgcgcgacgggttatatgcgatttcagcggtcagtcattttaccttaggtgccgtactggagcagcaggagcatactgccgccctgaccgaccgccctgcagcaccggacgaaaacctgccgccgctattgcgggaagcgctgcagattatggacagtgatgatggtgagcaggcctttctgcatggcctggagagcctgatccgggggtttgaggtgcagcttacggcactgttgcaaatagtc

SEQ ID NO: 406 - DNA, 624 bp, Artificial
  Modified tetracycline repressor
atgtctagattagataaaagtaaagtgattaacagcgcattagagctgcttaatgaggtcggaatcgaaggtttaacaacccgtaaactcgcccagaagcttggtgtagagcagcctacattgtattggcatgtaaaaaataagcgggccctactggatgcgctggcggtggagatcttggcgcgtcatcatgattattcactgcctgcggcgggggaatcctggcagtcatttctgcgcaataatgcaatgagtttccgccgcgcgctgctgcgttaccgtgacggtgcaaaagggcccctcggcacgcgtcctgatgaaaaacagtatgatacggtggaaacccagttacgctttatgacagaaaacggcttttcactgcgcgacgggttatatgcgatttcagcggtcagtcattttaccttaggtgccgtactggagcagcaggagcatactgccgccctgaccgaccgccctgcagcaccggacgaaaacctgccgccgctattgcgggaagcgctgcagattatggacagtgatgatggtgagcaggcctttctgcatggcctggagagcctgatccgggggtttgaggtgcagcttacggcactgttgcaaatagtc

SEQ ID NO: 407 - DNA, 624 bp, Artificial
  Modified tetracycline repressor
atgtctagattagataaaagtaaagtgattaacagcgcattagtgctgcttaatgaggccggattccagggtttgacaacccgtaaactcgcccagaagcttggtgtagagcagcctacattgtattggcatgtaaaaaataagcgggccctactggatgcgctggcggtggagatcttggcgcgtcatcatgattattcactgcctgcggcgggggaatcctggcagtcatttctgcgcaataatgcaatgagtttccgccgcgcgctgctgcgttaccgtgacggggtagaagtgcacctcggaacgcgtcctgatgaaaaacagtatgatacggtggaaacccagttacgctttatgacagaaaacggcttttcactgcgcgacgggttatatgcgatttcagcggtcagtcattttaccttaggtgccgtactggagcagcaggagcatactgccgccctgaccgaccgccctgcagcaccggacgaaaacctgccgccgctattgcgggaagcgctgcagattatggacagtgatgatggtgagcaggcctttctgcatggcctggagagcctgatccgggggtttgaggtgcagcttacggcactgttgcaaatagtc

SEQ ID NO: 408 - DNA, 624 bp, Artificial
  Modified tetracycline repressor
atgtctagattagataaaagtaaagtgattaacagcgcattagagcagcttcatgtgggtggaatagaaggtttaacaacccgtaaactcgcccagaagcttggtgtagagcagcctacattgtattggcatgtaaaaaataagcgggccctactggatgcgctggcggtggagatcttggcgcgtcatcatgattattcactgcctgcggcgggggaatcctggcagtcatttctgcgcaataatgcaatgagtttccgccgcgcgctgctgcgttaccgtgacacggcaaaagtgcacctcggcacgcgtcctgatgaaaaacagtatgatacggtggaaacccagttacgctttatgacagaaaacggcttttcactgcgcgacgggttatatgcgatttcagcggtcagtcattttaccttaggtgccgtactggagcagcaggagcatactgccgccctgaccgaccgccctgcagcaccggacgaaaacctgccgccgctattgcgggaagcgctgcagattatggacagtgatgatggtgagcaggcctttctgcatggcctggagagcctgatccgggggtttgaggtgcagcttacggcactgttgcaaatagtc

SEQ ID NO: 409 - DNA, 624 bp, Artificial
  Modified tetracycline repressor
atgtctagattagataaaagtaaagtgattaacagcgcattagagctgcttaatgaggtcggaatcgaagcattaacaacccgtaaactcgcccagaagcttggtgtagagcagcctacattgtattggcatgtaaaaaataagcgggccctactggatgcgctggcggtggagatcttggcgcgtcatcatgattattcactgcctgcggcgggggaatcctggcagtcatttctgcgcaataatgcaatgagtttccgccgcgcgctgctgcgttaccctgaaggggcaaaagtgcacctcgacacgcgtcctgatgaaaaacagtatgatacggtggaaacccagttacgctttatgacagaaaacggcttttcactgcgcgacgggttatatgcgatttcagcggtcagtcattttaccttaggtgccgtactggagcagcaggagcatactgccgccctgaccgaccgccctgcagcaccggacgaaaacctgccgccgctattgcgggaagcgctgcagattatggacagtgatgatggtgagcaggcctttctgcatggcctggagagcctgatccgggggtttgaggtgcagcttacggcactgttgcaaatagtc

SEQ ID NO: 410 - DNA, 624 bp, Artificial
  Modified tetracycline repressor
atgtctagattagataaaagtaaagtgattaacagcgcattagggttgcttaatgaggtcggaatcgaaggtttaacaacccgtaaactcgcccagaagcttggtgtagagcagcctacattgtattggcatgtaaaaaataagcgggccctactggatgcgctggcggtggagatcttggcgcgtcatcatgattattcactgcctgcggcgggggaatcctggcagtcatttctgcgcaataatgcaatgagtttccgccgcgcgctgctgcgttaccgtgccggggcaaaagggcacctcggcacgcgtcctgatgaaaaacagtatgatacggtggaaacccagttacgctttatgacagaaaacggcttttcactgcgcgacgggttatatgcgatttcagcggtcagtcattttaccttaggtgccgtactggagcagcaggagcatactgccgccctgaccgaccgccctgcagcaccggacgaaaacctgccgccgctattgcgggaagcgctgcagattatggacagtgatgatggtgagcaggcctttctgcatggcctggagagcctgatccgggggtttgaggtgcagcttacggcactgttgcaaatagtc

SEQ ID NO: 411 - DNA, 624 bp, Artificial
  Modified tetracycline repressor
atgtctagattagataaaagtaaagtgattaacagcgcattagacctgataactgaggtcggaatcggaggtttaacaacccgtaaactcgcccagaagcttggtgtagagcagcctacattgtattggcatgtaaaaaataagcgggccctactggatgtgctggcggtggagatcttggcgcgtcatcatgattattcactgcctgcggcgggggaatcctggcagtcatttctgcgcaataatgcaatgagtttccgccgcgcgctgctgcgttaccgtgccggggcaaaagtgcacctcggcacgcgtcctgatgaaaaacagtatgatacggtggaaacccagttacgctttatgacagaaaacggcttttcactgcgcgacgggttatatgcgatttcagcggtcagtcattttaccttaggtgccgtactggagcagcaggagcatactgccgccctgaccgaccgccctgcagcaccggacgaaaacctgccgccgctattgcgggaagcgctgcagattatggacagtgatgatggtgagcaggcctttctgcatggcctggagagcctgatccgggggtttgaggtgcagcttacggcactgttgcaaatagtc

SEQ ID NO: 412 - DNA, 624 bp, Artificial
  Modified tetracycline repressor
atgtctagattagataaaagtaaagtgattaacagcgcagtagagctgcttaatgaggtcggaatcgaaggtttaacaacccgtaaactcgcccagaagcttggtgtagagcagcctacattgtattggcatgtaaaaaataagcgggccctactggatgcgctggcggtggagatcttggcgcgtcatcatgattattcactgcctgcggcgggggaatcctggcagtcatttctgcgcaataatgcaatgagtttccgccgcgcgctgctgcgttaccgtgacgggacaaaagggcacctcggcacgcgtcctgatgaaaaacagtatgatacggtggaaacccagttacgctttatgacagaaaacggcttttcactgcgcgacgggttatatgcgatttcagcggtcagtcattttaccttaggtgccgtactggagcagcaggagcatactgccgccctgaccgaccgccctgcagcaccggacgaaaacctgccgccgctattgcgggaagcgctgcagattatggacagtgatgatggtgagcaggcctttctgcatggcctggagagcctgatccgggggtttgaggtgcagcttacggcactgttgcaaatagtc

SEQ ID NO: 413 - DNA, 624 bp, Artificial
  Modified tetracycline repressor
atgtctagattagataaaagtaaagtgattaacagcgcattcgagctgcttaatgaggtcgcaatcatgggtttaacaacccgtaaactcgcccagaagcttggtgtagagcagcctacattgtattggcatgtaaaaaataagcgggccctactggatgcgctggcggtggagatcttggcgcgtcatcatgattattcactgcctgcggcgggggaatcctggcagtcatttctgcgcaataatgcaatgagtttccgccgcgcgctgctgcgttaccgtgacatgccaaaagtgcaccccggcacgcgtcctgatgaaaaacagtatgatacggtggaaacccagttacgctttatgacagaaaacggcttttcactgcgcgacgggttatatgcgatttcagcggtcagtcattttaccttaggtgccgtactggagcagcaggagcatactgccgccctgaccgaccgccctgcagcaccggacgaaaacctgccgccgctattgcgggaagcgctgcagattatggacagtgatgatggtgagcaggcctttctgcatggcctggagagcctgatccgggggtttgaggtgcagcttacggcactgttgcaaatagtc

SEQ ID NO: 414 - DNA, 624 bp, Artificial
  Modified tetracycline repressor
atgtctagattagataaaagtaaagtgattaacagcgcattagagcggcttaatgatgtcggaatcgatggtttaacaacccgtaaactcgcccagaagcttggtgtagagcagcctacattgtattggcatgtaaaaaataagcgggccctactggatgcgctggcggtggagatcttggcgcgtcatcatgattattcactgcctgcggcgggggaatcctggcagtcatttctgcgcaataatgcaatgagtttccgccgcgcgctgctgcgttaccgtggcggggcaaaagcgcacctcgggacgcgtcctgatgaaaaacagtatgatacggtggaaacccagttacgctttatgacagaaaacggcttttcactgcgcgacgggttatatgcgatttcagcggtcagtcattttaccttaggtgccgtactggagcagcaggagcatactgccgccctgaccgaccgccctgcagcaccggacgaaaacctgccgccgctattgcgggaagcgctgcagattatggacagtgatgatggtgagcaggcctttctgcatggcctggagagcctgatccgggggtttgaggtgcagcttacggcactgttgcaaatagtc

SEQ ID NO: 415 - DNA, 624 bp, Artificial
  Modified tetracycline repressor
atgtctagattagataaaagtaaagtgattaacagcgcattagagctgtttaatgaggtcggaatcgaaggtttaacaacccgtaaactcgcccagaagcttggtgtagagcagcctacattgtattggcatgtaaaaaataagcgggccctactggatgcgcttgcggtggagatcttcgcggtgcatcatgattattcactgcctgcggcgggggaatcctggcagtcatttctgcgcaataatgcaatgagtttccgccgcgcgctgctgcgttaccgtgacggggcaaaagtgcacctcggcacgcgtcctgatgaaaaacagtatgatacggtggaaacccagttacgctttatgacagaaaacggcttttcactgcgcgacgggttatatgcgatttcagcggtcagtcattttaccttaggtgccgtactggagcagcaggagcatactgccgccctgaccgaccgccctgcagcaccggacgaaaacctgccgccgctattgcgggaagcgctgcagattatggacagtgatgatggtgagcaggcctttctgcatggcctggagagcctgatccgggggtttgaggtgcagcttacggcactgttgcaaatagtc

SEQ ID NO: 416 - DNA, 624 bp, Artificial
  Modified tetracycline repressor
atgtctagattagataaaagtaaagtgattaacagcgcattagagctgcttaatgagggaggaatcgaaggtttaacaacccgtaaactcgcccagaagcttggtgtagagcagcctacattgtattggcatgtaaaaaataagcgggccctactgaatgcactggggctggagttcttcgcgcgacatcatgattattcactgcctgcggcgggggaatcctggcagtcatttctgcgcaataatgcaatgagtttccgccgcgcgctgctgcgttaccgtgacggggcaaaagtgcacctcggcacgcgtcctgatgaaaaacagtatgatacggtggaaacccagttacgctttatgacagaaaacggcttttcactgcgcgacgggttatatgcgatttcagcggtcagtcattttaccttaggtgccgtactggagcagcaggagcatactgccgccctgaccgaccgccctgcagcaccggacgaaaacctgccgccgctattgcgggaagcgctgcagattatggacagtgatgatggtgagcaggcctttctgcatggcctggagagcctgatccgggggtttgaggtgcagcttacggcactgttgcaaatagtc

SEQ ID NO: 417 - DNA, 624 bp, Artificial
  Modified tetracycline repressor
atgtctagattagataaaagtaaagtgattaacagcgcattagagctgcttaatggggtcggaatcgaaggtttaacaacccgtaaactcgcccagaagcttggtgtagagcagcctacattgtattggcatgtaaaaaataagcgggccctcctgtatgcgctaccggtggagatcttggagcgtcatcatgattattcactgcctgcggcgggggaatcctggcagtcatttctgcgcaataatgcaatgagtttccgccgcgcgctgctgcgttaccgtgacggggcaaaagtgcacctcggcacgcgtcctgatgaaaaacagtatgatacggtggaaacccagttacgctttatgacagaaaacggcttttcactgcgcgacgggttatatgcgatttcagcggtcagtcattttaccttaggtgccgtactggagcagcaggagcatactgccgccctgaccgaccgccctgcagcaccggacgaaaacctgccgccgctattgcgggaagcgctgcagattatggacagtgatgatggtgagcaggcctttctgcatggcctggagagcctgatccgggggtttgaggtgcagcttacggcactgttgcaaatagtc

SEQ ID NO: 418 - DNA, 624 bp, Artificial
  Modified tetracycline repressor
atgtctagattagataaaagtaaagtgattaacagcgcattagagctgcttaatgaggtcggaatcgaaggtttaacaacccgtaaactcgcccagaagcttggtgtagagcagcctacattgtattggcatgtaaaaaataagcgggccctactggatgcgctggcggtggagatcttggcgcgtcatcatgattattcactgcctgcggcgggggaatcctggcagtcatttctgcgcaataatgcaatgagtttccgccgcgcgctgctgcgttaccctgacgtgacaaacgtgcagctcggcacgcgtcctgatgaaaaacagtatgatacggtggaaacccagttacgctttatgacagaaaacggcttttcactgcgcgacgggttatatgcgatttcagcggtcagtcattttaccttaggtgccgtactggagcagcaggagcatactgccgccctgaccgaccgccctgcagcaccggacgaaaacctgccgccgctattgcgggaagcgctgcagattatggacagtgatgatggtgagcaggcctttctgcatggcctggagagcctgatccgggggtttgaggtgcagcttacggcactgttgcaaatagtc

SEQ ID NO: 419 - DNA, 624 bp, Artificial
  Modified tetracycline repressor
atgtctagattagataaaagtaaagtgattaacagcgcattagagcagctttatgaggtcggaatcgaaggtttaacaacccgtaaactcgcccagaagcttggtgtagagcagcctacattgtattggcatgtaaaaaataagcgggccctactggatgcgctggcggtggagatcttggcgcgtcatcatgattattcactgcctgcggcgggggaatcctggcagtcatttctgcgcaataatgcaatgagtttccgccgcgcgctgctgcgttaccgtgacgggggaaaagtgtccctcggcacgcgtcctgatgaaaaacagtatgatacggtggaaacccagttacgctttatgacagaaaacggcttttcactgcgcgacgggttatatgcgatttcagcggtcagtcattttaccttaggtgccgtactggagcagcaggagcatactgccgccctgaccgaccgccctgcagcaccggacgaaaacctgccgccgctattgcgggaagcgctgcagattatggacagtgatgatggtgagcaggcctttctgcatggcctggagagcctgatccgggggtttgaggtgcagcttacggcactgttgcaaatagtc

SEQ ID NO: 420 - DNA, 624 bp, Artificial
  Modified tetracycline repressor
atgtctagattagataaaagtaaagtgattaacagcgccttagatctgctgaatgtggtcggaataaaaggtttaacaacccgtaaactcgcccagaagcttggtgtagagcagcctacattgtattggcatgtaaaaaataagcgggccctactggatgcgctggcggtggagatcttggcgcgtcatcatgattattcactgcctgcggcgggggaatcctggcagtcatttctgcgcaataatgcaatgagtttccgccgcgcgctgctgcgttaccataacggggcaaaagtgcacctcggcacgcgtcctgatgaaaaacagtatgatacggtggaaacccagttacgctttatgacagaaaacggcttttcactgcgcgacgggttatatgcgatttcagcggtcagtcattttaccttaggtgccgtactggagcagcaggagcatactgccgccctgaccgaccgccctgcagcaccggacgaaaacctgccgccgctattgcgggaagcgctgcagattatggacagtgatgatggtgagcaggcctttctgcatggcctggagagcctgatccgggggtttgaggtgcagcttacggcactgttgcaaatagtc

SEQ ID NO: 421 - DNA, 624 bp, Artificial
  Modified tetracycline repressor
atgtctagattagataaaagtaaagtgattaacagcgcatttgagctgcttaatgaggtcggaatcgaaggtttaacaacccgtaaactcgcccagaagcttggtgtagagcagcctacattgtattggcatgtaaaaaataagcgggccctactggatgcgctggcggtggagatcttggcgcgtcatcatgattattcactgcctgcggcgggggaatcctggcagtcatttctgcgcaataatgcaatgagtttccgccgcgcgctgctgcgttaccgtgccggggcaaaagggcacctcggcacgcgtcctgatgaaaaacagtatgatacggtggaaacccagttacgctttatgacagaaaacggcttttcactgcgcgacgggttatatgcgatttcagcggtcagtcattttaccttaggtgccgtactggagcagcaggagcatactgccgccctgaccgaccgccctgcagcaccggacgaaaacctgccgccgctattgcgggaagcgctgcagattatggacagtgatgatggtgagcaggcctttctgcatggcctggagagcctgatccgggggtttgaggtgcagcttacggcactgttgcaaatagtc

SEQ ID NO: 422 - DNA, 624 bp, Artificial
  Modified tetracycline repressor
atgtctagattagataaaagtaaagtgattaacagcgcattagggctgcttaaggaggtcggaatcgaaggtttaacaacccgtaaactcgcccagaagcttggtgtagagcagcctacattgtattggcatgtaaaaaataagcgggccctactggatgcgctggcggtggagatcttggcgcgtcatcatgattattcactgcctgcggcgggggaatcctggcagtcatttctgcgcaataatgcaatgagtttccgccgcgcgctgctgcgttaccatgacggcgcaaaagtgcacctcgtcacgcgtcctgatgaaaaacagtatgatacggtggaaacccagttacgctttatgacagaaaacggcttttcactgcgcgacgggttatatgcgatttcagcggtcagtcattttaccttaggtgccgtactggagcagcaggagcatactgccgccctgaccgaccgccctgcagcaccggacgaaaacctgccgccgctattgcgggaagcgctgcagattatggacagtgatgatggtgagcaggcctttctgcatggcctggagagcctgatccgggggtttgaggtgcagcttacggcactgttgcaaatagtc

SEQ ID NO: 423 - DNA, 624 bp, Artificial
  Modified tetracycline repressor
atgtctagattagataaaagtaaagtgattaacagcgcagtagagctgtttaatgaggccggaatggaaggttttacaacccgtaaactcgcccagaagcttggtgtagagcagcctacattgtattggcatgtaaaaaataagcgggccctactggatgcgctggcggtggagatcttggcgcgtcatcatgattattcactgcctgcggcgggggaatcctggcagtcatttctgcgcaataatgcaatgagtttccgccgcgcgctgctgcgttaccgtcacggggcaaaagtgcacctcggcacgcgtcctgatgaaaaacagtatgatacggtggaaacccagttacgctttatgacagaaaacggcttttcactgcgcgacgggttatatgcgatttcagcggtcagtcattttaccttaggtgccgtactggagcagcaggagcatactgccgccctgaccgaccgccctgcagcaccggacgaaaacctgccgccgctattgcgggaagcgctgcagattatggacagtgatgatggtgagcaggcctttctgcatggcctggagagcctgatccgggggtttgaggtgcagcttacggcactgttgcaaatagtc

SEQ ID NO: 424 - DNA, 624 bp, Artificial
  Modified tetracycline repressor
atgtctagattagataaaagtaaagtgattaacagcgcattagagctgcttcatgaggtcggaatcgaaggttttacaacccgtaaactcgcccagaagcttggtgtagagcagcctacattgtattggcatgtaaaaaataagcgggccctactggatgcgctggcggtggagatcttggcgcgtcatcatgattattcactgcctgcggcgggggaatcctggcagtcatttctgcgcaataatgcaatgagtttccgccgcgcgctgctgcgttaccgtgacgggccaaacgtgcaccacggcacgcgtcctgatgaaaaacagtatgatacggtggaaacccagttacgctttatgacagaaaacggcttttcactgcgcgacgggttatatgcgatttcagcggtcagtcattttaccttaggtgccgtactggagcagcaggagcatactgccgccctgaccgaccgccctgcagcaccggacgaaaacctgccgccgctattgcgggaagcgctgcagattatggacagtgatgatggtgagcaggcctttctgcatggcctggagagcctgatccgggggtttgaggtgcagcttacggcactgttgcaaatagtc

SEQ ID NO: 425 - DNA, 624 bp, Artificial
  Modified tetracycline repressor
atgtctagattagataaaagtaaagtgattaacagcgcattagcgctgcttaatgaggtcggaatcgaaggtttaacaacccgtaaactcgcccagaagcttggtgtagagcagcctacattgtattggcatgtaaaaaataagcgggccctactggatgcgctggcggtggagatcttggcgcgtcatcatgattattcactgcctgcggcgggggaatcctggcagtcatttctgcgcaataatgcaatgagtttccgccgcgcgctgctgcgttaccgtgacatgccaaaagtgcaccccggcacgcgtcctgatgaaaaacagtatgatacggtggaaacccagttacgctttatgacagaaaacggcttttcactgcgcgacgggttatatgcgatttcagcggtcagtcattttaccttaggtgccgtactggagcagcaggagcatactgccgccctgaccgaccgccctgcagcaccggacgaaaacctgccgccgctattgcgggaagcgctgcagattatggacagtgatgatggtgagcaggcctttctgcatggcctggagagcctgatccgggggtttgaggtgcagcttacggcactgttgcaaatagtc

SEQ ID NO: 426 - DNA, 624 bp, Artificial
  Modified tetracycline repressor
atgtctagattagataaaagtaaagtgattaacagcgcattagagctgcttaatgaggtcggaatagaaggtttaacaacccgtaaactcgcccagaagcttggtgtagagcagcctacattgtattggcatgtaaaaaataagcgggccctactggatgcgctggcggtggagatcttggcgcgtcatcatgattattcactgcctgcggcgggggaatcctggcagtcatttctgcgcaataatgcaatgagtttccgccgcgcgctgctgcgttaccctgacggggcaaaagagcacctcggcacgcgtcctgatgaaaaacagtatgatacggtggaaacccagttacgctttatgacagaaaacggcttttcactgcgcgacgggttatatgcgatttcagcggtcagtcattttaccttaggtgccgtactggagcagcaggagcatactgccgccctgaccgaccgccctgcagcaccggacgaaaacctgccgccgctattgcgggaagcgctgcagattatggacagtgatgatggtgagcaggcctttctgcatggcctggagagcctgatccgggggtttgaggtgcagcttacggcactgttgcaaatagtc

SEQ ID NO: 427 - DNA, 624 bp, Artificial
  Modified tetracycline repressor
atgtctagattagataaaagtaaagtgattaacagcgcattagagctgcttaatgaggtcggaatcgaaggtttaacaacccgtaaactcgcccagaagcttggtgtagagcagcctacattgtattggcatgtaaaaaataagcgggccctactggatgcgctggcggtggagatcttggcgcgtcatcatgattattcactgcctgcggcgggggaatcctggcagtcatttctgcgcaataatgcaatgagtttccgccgcgcgctgctgcgttactgtgacggggcaaaagagcacctcggcacgcgtcctgatgaaaaacagtatgatacggtggaaacccagttacgctttatgacagaaaacggcttttcactgcgcgacgggttatatgcgatttcagcggtcagtcattttaccttaggtgccgtactggagcagcaggagcatactgccgccctgaccgaccgccctgcagcaccggacgaaaacctgccgccgctattgcgggaagcgctgcagattatggacagtgatgatggtgagcaggcctttctgcatggcctggagagcctgatccgggggtttgaggtgcagcttacggcactgttgcaaatagtc

SEQ ID NO: 428 - DNA, 624 bp, Artificial
  Modified tetracycline repressor
atgtctagattagataaaagtaaagtgattaacagcgcattagagctgcttaaggcggtcggaatcgaaggtttaacaacccgtaaactcgcccagaagcttggtgtagagcagcctacattgtattggcatgtaaaaaataagcgggccctactggatgcgctggcggtggagatcttggcgcgtcatcatgattattcactgcctgcggcgggggaatcctggcagtcatttctgcgcaataatgcaatgagtttccgccgcgcgctgctgcgttaccgtgacggggcaaaagtgcacctaagcacgcgtcctgatgaaaaacagtatgatacggtggaaacccagttacgctttatgacagaaaacggcttttcactgcgcgacgggttatatgcgatttcagcggtcagtcattttaccttaggtgccgtactggagcagcaggagcatactgccgccctgaccgaccgccctgcagcaccggacgaaaacctgccgccgctattgcgggaagcgctgcagattatggacagtgatgatggtgagcaggcctttctgcatggcctggagagcctgatccgggggtttgaggtgcagcttacggcactgttgcaaatagtc

SEQ ID NO: 429 - DNA, 624 bp, Artificial
  Modified tetracycline repressor
atgtctagattagataaaagtaaagtgattaacagcgcactagagctgcttaatgagggcggaatcgaaggtttaacaacccgtaaactcgcccagaagcttggtgtagagcagcctacattgtattggcatgtaaaaaataagcgggccctactggatgcgctggcggtggagatcttggcgcgtcatcatgattattcactgcctgcggcgggggaatcctggcagtcatttctgcgcaataatgcaatgagtttccgccgcgcgctgctgcgttaccgtgacggggcaaaagagcacctcggcacgcgtcctgatgaaaaacagtatgatacggtggaaacccagttacgctttatgacagaaaacggcttttcactgcgcgacgggttatatgcgatttcagcggtcagtcattttaccttaggtgccgtactggagcagcaggagcatactgccgccctgaccgaccgccctgcagcaccggacgaaaacctgccgccgctattgcgggaagcgctgcagattatggacagtgatgatggtgagcaggcctttctgcatggcctggagagcctgatccgggggtttgaggtgcagcttacggcactgttgcaaatagtc

SEQ ID NO: 430 - DNA, 624 bp, Artificial
  Modified tetracycline repressor
atgtctagattagataaaagtaaagtgattaacagcgcgttagagctgcttaatgtggccggaatcgaaggtttaacaacccgtaaactcgcccagaagcttggtgtagagcagcctacattgtattggcatgtaaaaaataagcgggccctactggatgcgctggcggtggagatcttggcgcgtcatcatgattattcactgcctgcggcgggggaatcctggcagtcatttctgcgcaataatgcaatgagtttccgccgcgcgctgctgcgttaccgtatcggagcaaaagtgcacctcggcacgcgtcctgatgaaaaacagtatgatacggtggaaacccagttacgctttatgacagaaaacggcttttcactgcgcgacgggttatatgcgatttcagcggtcagtcattttaccttaggtgccgtactggagcagcaggagcatactgccgccctgaccgaccgccctgcagcaccggacgaaaacctgccgccgctattgcgggaagcgctgcagattatggacagtgatgatggtgagcaggcctttctgcatggcctggagagcctgatccgggggtttgaggtgcagcttacggcactgttgcaaatagtc

SEQ ID NO: 431 - DNA, 624 bp, Artificial
  Modified tetracycline repressor
atgtctagattagataaaagtaaagtgattaacagcgcattagagctgcttgatgaggtcggaatcgcaggtttaacaacccgtaaactcgcccagaagcttggtgtagagcagcctacattgtattggcatgtaaaaaataagcgggccctactggatgcgctggcggtggagatcttggcgcgtcatcatgattattcactgcctgcggcgggggaatcctggcagtcatttctgcgcaataatgcaatgagtttccgccgcgcgctgctgcgttaccgtaacggggcaaaagtgccctccggcacgcgtcctgatgaaaaacagtatgatacggtggaaacccagttacgctttatgacagaaaacggcttttcactgcgcgacgggttatatgcgatttcagcggtcagtcattttaccttaggtgccgtactggagcagcaggagcatactgccgccctgaccgaccgccctgcagcaccggacgaaaacctgccgccgctattgcgggaagcgctgcagattatggacagtgatgatggtgagcaggcctttctgcatggcctggagagcctgatccgggggtttgaggtgcagcttacggcactgttgcaaatagtc

SEQ ID NO: 432 - DNA, 624 bp, Artificial; identical to SEQ ID NO: 406
  Modified tetracycline repressor

SEQ ID NO: 433 - DNA, 624 bp, Artificial
  Modified tetracycline repressor
atgtctagattagataaaagtaaagtgattaacagcgcattagagctgcttaatgaggtcggaatcgaaggtttaacaacccgtaaactcgcccagaagcttggtgtagagcagcctacattgtattggcatgtaaaaaataagcgggccctactggatgcgctggcggtggagatcttggcgcgtcatcatgattattcactgcctgcggcgggggaatcctggcagtcatttctgcgcaataatgcaatgagtttccgccgcgcgctgctgcgttatcgtgaccggccaaaagtgcacctcggcacgcgtcctgatgaaaaacagtatgatacggtggaaacccagttacgctttatgacagaaaacggcttttcactgcgcgacgggttatatgcgatttcagcggtcagtcattttaccttaggtgccgtactggagcagcaggagcatactgccgccctgaccgaccgccctgcagcaccggacgaaaacctgccgccgctattgcgggaagcgctgcagattatggacagtgatgatggtgagcaggcctttctgcatggcctggagagcctgatccgggggtttgaggtgcagcttacggcactgttgcaaatagtc

SEQ ID NO: 434 - DNA, 624 bp, Artificial
  Modified tetracycline repressor
atgtctagattagataaaagtaaagtgattaacagcgcattagagctgcttaatgaggtaggagtcgatggtttaacaacccgtaaactcgcccagaagcttggtgtagagcagcctacattgtattggcatgtaaaaaataagcgggccctactggatgcgctggcggtggagatcttggcgcgtcatcatgattattcactgcctgcggcgggggaatcctggcagtcatttctgcgcaataatgcaatgagtttccgccgcgcgctgctgcgttaccgtaacggggcaaaagtgcccctcggcacgcgtcctgatgaaaaacagtatgatacggtggaaacccagttacgctttatgacagaaaacggcttttcactgcgcgacgggttatatgcgatttcagcggtcagtcattttaccttaggtgccgtactggagcagcaggagcatactgccgccctgaccgaccgccctgcagcaccggacgaaaacctgccgccgctattgcgggaagcgctgcagattatggacagtgatgatggtgagcaggcctttctgcatggcctggagagcctgatccgggggtttgaggtgcagcttacggcactgttgcaaatagtc

SEQ ID NO: 435 - DNA, 624 bp, Artificial
  Modified tetracycline repressor
atgtctagattagataaaagtaaagtgattaacagcgcattagagctgcttaatgaggtcggaatcgaaggtttaacaacccgtaaactcgcccagaagcttggtgtagagcagcctacattgtattggcatgtaaaaaataagcgggccctactggatgcgctggcggtggagatcttggcgcgtcatcatgattattcactgcctgcggcgggggaatcctggcagtcatttctgcgcaataatgcaatgagtttccgccgcgcgctgctgcgttaccgttacgaggcaaaagtccacctcggcacgcgtcctgatgaaaaacagtatgatacggtggaaacccagttacgctttatgacagaaaacggcttttcactgcgcgacgggttatatgcgatttcagcggtcagtcattttaccttaggtgccgtactggagcagcaggagcatactgccgccctgaccgaccgccctgcagcaccggacgaaaacctgccgccgctattgcgggaagcgctgcagattatggacagtgatgatggtgagcaggcctttctgcatggcctggagagcctgatccgggggtttgaggtgcagcttacggcactgttgcaaatagtc

SEQ ID NO: 436 - DNA, 624 bp, Artificial; identical to SEQ ID NO: 406
  Modified tetracycline repressor

SEQ ID NO: 437 - DNA, 624 bp, Artificial; identical to SEQ ID NO: 316
  Modified tetracycline repressor

SEQ ID NO: 438 - DNA, 624 bp, Artificial
  Modified tetracycline repressor
atgtctagattagataaaagtaaagtgattaacagcgcattagagctgcttaatgaggtcggaatcgaaggtttaacaacccgtaaactcgcccagaagcttggtgtagagcagcctacattgtattggcatgtaaaaaataagcgggccctactggatgcgctggcggtggagatcttggcgcgtcatcatgattattcactgcctgcggcgggggaatcctggcagtcatttctgcgcaataatgcaatgagtttccgccgcgcgctgctgcgttaccgtgaccacgcaaaaaggcacctcggcacgcgtcctgatgaaaaacagtatgatacggtggaaacccagttacgctttatgacagaaaacggcttttcactgcgcgacgggttatatgcgatttcagcggtcagtcattttaccttaggtgccgtactggagcagcaggagcatactgccgccctgaccgaccgccctgcagcaccggacgaaaacctgccgccgctattgcgggaagcgctgcagattatggacagtgatgatggtgagcaggcctttctgcatggcctggagagcctgatccgggggtttgaggtgcagcttacggcactgttgcaaatagtc

SEQ ID NO: 439 - DNA, 624 bp, Artificial
  Modified tetracycline repressor
atgtctagattagataaaagtaaagtgattaacagcgcattagagctgcttaatgaggtcggaatcgaaggtttaacaacccgtaaactcgcccagaagcttggtgtagagcagcctacattgtattggcatgtaaaaaataagcgggccctactggatgcgctggcggtggagatcttggcgcgtcatcatgattattcactgcctgcggcgggggaatcctggcagtcatttctgcgcaataatgcaatgagtttccgccgcgcgctgctgcgttaccgtgacaaggcaaaagcccacctcggcacgcgtcctgatgaaaaacagtatgatacggtggaaacccagttacgctttatgacagaaaacggcttttcactgcgcgacgggttatatgcgatttcagcggtcagtcattttaccttaggtgccgtactggagcagcaggagcatactgccgccctgaccgaccgccctgcagcaccggacgaaaacctgccgccgctattgcgggaagcgctgcagattatggacagtgatgatggtgagcaggcctttctgcatggcctggagagcctgatccgggggtttgaggtgcagcttacggcactgttgcaaatagtc

SEQ ID NO: 440 - DNA, 624 bp, Artificial
  Modified tetracycline repressor
atgtctagattagataaaagtaaagtgattaacagcgcattagagctgcttaatgaggtcggaatcgaaggtttaacaacccgtaaactcgcccagaagcttggtgtagagcagcctacattgtattggcatgtaaaaaataagcgggccctactggatgcgctggcggtggagatcttggcgcgtcatcatgattattcactgcctgcggcgggggaatcctggcagtcatttctgcgcaataatgcaatgagtttccgccgcgcgctgctgcgttaccgtgacgaggcaaaaacccacctcggcacgcgtcctgatgaaaaacagtatgatacggtggaaacccagttacgctttatgacagaaaacggcttttcactgcgcgacgggttatatgcgatttcagcggtcagtcattttaccttaggtgccgtactggagcagcaggagcatactgccgccctgaccgaccgccctgcagcaccggacgaaaacctgccgccgctattgcgggaagcgctgcagattatggacagtgatgatggtgagcaggcctttctgcatggcctggagagcctgatccgggggtttgaggtgcagcttacggcactgttgcaaatagtc

SEQ ID NO: 441 - DNA, 624 bp, Artificial
  Modified tetracycline repressor
atgtctagattagataaaagtaaagtgattaacagcgcattagagctgcttaatgaggtcggaatcgaaggtttaacaacccgtaaactcgcccagaagcttggtgtagagcagcctacattgtattggcatgtaaaaaataagcgggccctactggatgcgctggcggtggagatcttggcgcgtcatcatgattattcactgcctgcggcgggggaatcctggcagtcatttctgcgcaataatgcaatgagtttccgccgcgcgctgctgcgttaccgtgaccccgcaaaatcgcacctcggcacgcgtcctgatgaaaaacagtatgatacggtggaaacccagttacgctttatgacagaaaacggcttttcactgcgcgacgggttatatgcgatttcagcggtcagtcattttaccttaggtgccgtactggagcagcaggagcatactgccgccctgaccgaccgccctgcagcaccggacgaaaacctgccgccgctattgcgggaagcgctgcagattatggacagtgatgatggtgagcaggcctttctgcatggcctggagagcctgatccgggggtttgaggtgcagcttacggcactgttgcaaatagtc

SEQ ID NO: 442 - DNA, 624 bp, Artificial
  Modified tetracycline repressor
atgtctagattagataaaagtaaagtgattaacagcgcattagagctgcttaatgaggtcggaatcgaaggtttaacaacccgtaaactcgcccagaagcttggtgtagagcagcctacattgtattggcatgtaaaaaataagcgggccctactggatgcgctggcggtggagatcttggcgcgtcatcatgattattcactgcctgcggcgggggaatcctggcagtcatttctgcgcaataatgcaatgagtttccgccgcgcgctgctgcgttaccgtgacatcgcaaaaaagcacctcggcacgcgtcctgatgaaaaacagtatgatacggtggaaacccagttacgctttatgacagaaaacggcttttcactgcgcgacgggttatatgcgatttcagcggtcagtcattttaccttaggtgccgtactggagcagcaggagcatactgccgccctgaccgaccgccctgcagcaccggacgaaaacctgccgccgctattgcgggaagcgctgcagattatggacagtgatgatggtgagcaggcctttctgcatggcctggagagcctgatccgggggtttgaggtgcagcttacggcactgttgcaaatagtc

SEQ ID NO: 443 - DNA, 624 bp, Artificial
  Modified tetracycline repressor
atgtctagattagataaaagtaaagtgattaacagcgcattagagctgcttaatgaggtcggaatcgaaggtttaacaacccgtaaactcgcccagaagcttggtgtagagcagcctacattgtattggcatgtaaaaaataagcgggccctactggatgcgctggcggtggagatcttggcgcgtcatcatgattattcactgcctgcggcgggggaatcctggcagtcatttctgcgcaataatgcaatgagtttccgccgcgcgctgctgcgttaccgtgacaacgcaaaacagcacctcggcacgcgtcctgatgaaaaacagtatgatacggtggaaacccagttacgctttatgacagaaaacggcttttcactgcgcgacgggttatatgcgatttcagcggtcagtcattttaccttaggtgccgtactggagcagcaggagcatactgccgccctgaccgaccgccctgcagcaccggacgaaaacctgccgccgctattgcgggaagcgctgcagattatggacagtgatgatggtgagcaggcctttctgcatggcctggagagcctgatccgggggtttgaggtgcagcttacggcactgttgcaaatagtc

SEQ ID NO: 444 - DNA, 624 bp, Artificial
  Modified tetracycline repressor
atgtctagattagataaaagtaaagtgattaacagcgcattagagctgcttaatgaggtcggaatcgaaggtttaacaacccgtaaactcgcccagaagcttggtgtagagcagcctacattgtattggcatgtaaaaaataagcgggccctactggatgcgctggcggtggagatcttggcgcgtcatcatgattattcactgcctgcggcgggggaatcctggcagtcatttctgcgcaataatgcaatgagtttccgccgcgcgctgctgcgttaccgtgacctggcaaaaaagcacctcggcacgcgtcctgatgaaaaacagtatgatacggtggaaacccagttacgctttatgacagaaaacggcttttcactgcgcgacgggttatatgcgatttcagcggtcagtcattttaccttaggtgccgtactggagcagcaggagcatactgccgccctgaccgaccgccctgcagcaccggacgaaaacctgccgccgctattgcgggaagcgctgcagattatggacagtgatgatggtgagcaggcctttctgcatggcctggagagcctgatccgggggtttgaggtgcagcttacggcactgttgcaaatagtc

SEQ ID NO: 445 - DNA, 624 bp, Artificial
  Modified tetracycline repressor
atgtctagattagataaaagtaaagtgattaacagcgcattagagctgcttaatgaggtcggaatcgaaggtttaacaacccgtaaactcgcccagaagcttggtgtagagcagcctacattgtattggcatgtaaaaaataagcgggccctactggatgcgctggcggtggagatcttggcgcgtcatcatgattattcactgcctgcggcgggggaatcctggcagtcatttctgcgcaataatgcaatgagtttccgccgcgcgctgctgcgttaccgtgacaacgcaaaacaccacctcggcacgcgtcctgatgaaaaacagtatgatacggtggaaacccagttacgctttatgacagaaaacggcttttcactgcgcgacgggttatatgcgatttcagcggtcagtcattttaccttaggtgccgtactggagcagcaggagcatactgccgccctgaccgaccgccctgcagcaccggacgaaaacctgccgccgctattgcgggaagcgctgcagattatggacagtgatgatggtgagcaggcctttctgcatggcctggagagcctgatccgggggtttgaggtgcagcttacggcactgttgcaaatagtc

SEQ ID NO: 446 - DNA, 624 bp, Artificial
  Modified tetracycline repressor
atgtctagattagataaaagtaaagtgattaacagcgcattagagctgcttaatgaggtcggaatcgaaggtttaacaacccgtaaactcgcccagaagcttggtgtagagcagcctacattgtattggcatgtaaaaaataagcgggccctactggatgcgctggcggtggagatcttggcgcgtcatcatgattattcactgcctgcggcgggggaatcctggcagtcatttctgcgcaataatgcaatgagtttccgccgcgcgctgctgcgttaccgtgaccacgcaaaaaaccacctcggcacgcgtcctgatgaaaaacagtatgatacggtggaaacccagttacgctttatgacagaaaacggcttttcactgcgcgacgggttatatgcgatttcagcggtcagtcattttaccttaggtgccgtactggagcagcaggagcatactgccgccctgaccgaccgccctgcagcaccggacgaaaacctgccgccgctattgcgggaagcgctgcagattatggacagtgatgatggtgagcaggcctttctgcatggcctggagagcctgatccgggggtttgaggtgcagcttacggcactgttgcaaatagtc

SEQ ID NO: 447 - DNA, 624 bp, Artificial
  Modified tetracycline repressor
atgtctagattagataaaagtaaagtgattaacagcgcattagagctgcttaatgaggtcggaatcgaaggtttaacaacccgtaaactcgcccagaagcttggtgtagagcagcctacattgtattggcatgtaaaaaataagcgggccctactggatgcgctggcggtggagatcttggcgcgtcatcatgattattcactgcctgcggcgggggaatcctggcagtcatttctgcgcaataatgcaatgagtttccgccgcgcgctgctgcgttaccgtgacaacgcaaaaccgcacctcggcacgcgtcctgatgaaaaacagtatgatacggtggaaacccagttacgctttatgacagaaaacggcttttcactgcgcgacgggttatatgcgatttcagcggtcagtcattttaccttaggtgccgtactggagcagcaggagcatactgccgccctgaccgaccgccctgcagcaccggacgaaaacctgccgccgctattgcgggaagcgctgcagattatggacagtgatgatggtgagcaggcctttctgcatggcctggagagcctgatccgggggtttgaggtgcagcttacggcactgttgcaaatagtc

SEQ ID NO: 448 - DNA, 624 bp, Artificial
  Modified tetracycline repressor
atgtctagattagataaaagtaaagtgattaacagcgcattagagctgcttaatgaggtcggaatcgaaggtttaacaacccgtaaactcgcccagaagcttggtgtagagcagcctacattgtattggcatgtaaaaaataagcgggccctactggatgcgctggcggtggagatcttggcgcgtcatcatgattattcactgcctgcggcgggggaatcctggcagtcatttctgcgcaataatgcaatgagtttccgccgcgcgctgctgcgttaccgtgacagggcaaaataccacctcggcacgcgtcctgatgaaaaacagtatgatacggtggaaacccagttacgctttatgacagaaaacggcttttcactgcgcgacgggttatatgcgatttcagcggtcagtcattttaccttaggtgccgtactggagcagcaggagcatactgccgccctgaccgaccgccctgcagcaccggacgaaaacctgccgccgctattgcgggaagcgctgcagattatggacagtgatgatggtgagcaggcctttctgcatggcctggagagcctgatccgggggtttgaggtgcagcttacggcactgttgcaaatagtc

SEQ ID NO: 449 - DNA, 624 bp, Artificial
  Modified tetracycline repressor
atgtctagattagataaaagtaaagtgattaacagcgcattagagctgcttaatgaggtcggaatcgaaggtttaacaacccgtaaactcgcccagaagcttggtgtagagcagcctacattgtattggcatgtaaaaaataagcgggccctactggatgcgctggcggtggagatcttggcgcgtcatcatgattattcactgcctgcggcgggggaatcctggcagtcatttctgcgcaataatgcaatgagtttccgccgcgcgctgctgcgttaccgtgaccacgcaaaacagcacctcggcacgcgtcctgatgaaaaacagtatgatacggtggaaacccagttacgctttatgacagaaaacggcttttcactgcgcgacgggttatatgcgatttcagcggtcagtcattttaccttaggtgccgtactggagcagcaggagcatactgccgccctgaccgaccgccctgcagcaccggacgaaaacctgccgccgctattgcgggaagcgctgcagattatggacagtgatgatggtgagcaggcctttctgcatggcctggagagcctgatccgggggtttgaggtgcagcttacggcactgttgcaaatagtc

SEQ ID NO: 450 - DNA, 624 bp, Artificial
  Modified tetracycline repressor
atgtctagattagataaaagtaaagtgattaacagcgcattagagctgcttaatgaggtcggaatcgaaggtttaacaacccgtaaactcgcccagaagcttggtgtagagcagcctacattgtattggcatgtaaaaaataagcgggccctactggatgcgctggcggtggagatcttggcgcgtcatcatgattattcactgcctgcggcgggggaatcctggcagtcatttctgcgcaataatgcaatgagtttccgccgcgcgctgctgcgttaccgtgacaccgcaaaagaccacctcggcacgcgtcctgatgaaaaacagtatgatacggtggaaacccagttacgctttatgacagaaaacggcttttcactgcgcgacgggttatatgcgatttcagcggtcagtcattttaccttaggtgccgtactggagcagcaggagcatactgccgccctgaccgaccgccctgcagcaccggacgaaaacctgccgccgctattgcgggaagcgctgcagattatggacagtgatgatggtgagcaggcctttctgcatggcctggagagcctgatccgggggtttgaggtgcagcttacggcactgttgcaaatagtc

SEQ ID NO: 451 - DNA, 624 bp, Artificial
  Modified tetracycline repressor
atgtctagattagataaaagtaaagtgattaacagcgcattagagctgcttaatgaggtcggaatcgaaggtttaacaacccgtaaactcgcccagaagcttggtgtagagcagcctacattgtattggcatgtaaaaaataagcgggccctactggatgcgctggcggtggagatcttggcgcgtcatcatgattattcactgcctgcggcgggggaatcctggcagtcatttctgcgcaataatgcaatgagtttccgccgcgcgctgctgcgttaccgtgacaacgcaaaaaaccacctcggcacgcgtcctgatgaaaaacagtatgatacggtggaaacccagttacgctttatgacagaaaacggcttttcactgcgcgacgggttatatgcgatttcagcggtcagtcattttaccttaggtgccgtactggagcagcaggagcatactgccgccctgaccgaccgccctgcagcaccggacgaaaacctgccgccgctattgcgggaagcgctgcagattatggacagtgatgatggtgagcaggcctttctgcatggcctggagagcctgatccgggggtttgaggtgcagcttacggcactgttgcaaatagtc

SEQ ID NO: 452 - DNA, 624 bp, Artificial
  Modified tetracycline repressor
atgtctagattagataaaagtaaagtgattaacagcgcattagagctgcttaatgaggtcggaatcgaaggtttaacaacccgtaaactcgcccagaagcttggtgtagagcagcctacattgtattggcatgtaaaaaataagcgggccctactggatgcgctggcggtggagatcttggcgcgtcatcatgattattcactgcctgcggcgggggaatcctggcagtcatttctgcgcaataatgcaatgagtttccgccgcgcgctgctgcgttaccgtgacccggcaaaaccccacctcggcacgcgtcctgatgaaaaacagtatgatacggtggaaacccagttacgctttatgacagaaaacggcttttcactgcgcgacgggttatatgcgatttcagcggtcagtcattttaccttaggtgccgtactggagcagcaggagcatactgccgccctgaccgaccgccctgcagcaccggacgaaaacctgccgccgctattgcgggaagcgctgcagattatggacagtgatgatggtgagcaggcctttctgcatggcctggagagcctgatccgggggtttgaggtgcagcttacggcactgttgcaaatagtc

SEQ ID NO: 453 - DNA, 624 bp, Artificial
  Modified tetracycline repressor
atgtctagattagataaaagtaaagtgattaacagcgcattagagctgcttaatgaggtcggaatcgaaggtttaacaacccgtaaactcgcccagaagcttggtgtagagcagcctacattgtattggcatgtaaaaaataagcgggccctactggatgcgctggcggtggagatcttggcgcgtcatcatgattattcactgcctgcggcgggggaatcctggcagtcatttctgcgcaataatgcaatgagtttccgccgcgcgctgctgcgttaccgtgaccccgcaaaataccacctcggcacgcgtcctgatgaaaaacagtatgatacggtggaaacccagttacgctttatgacagaaaacggcttttcactgcgcgacgggttatatgcgatttcagcggtcagtcattttaccttaggtgccgtactggagcagcaggagcatactgccgccctgaccgaccgccctgcagcaccggacgaaaacctgccgccgctattgcgggaagcgctgcagattatggacagtgatgatggtgagcaggcctttctgcatggcctggagagcctgatccgggggtttgaggtgcagcttacggcactgttgcaaatagtc

SEQ ID NO: 454 - DNA, 624 bp, Artificial
  Modified tetracycline repressor
atgtctagattagataaaagtaaagtgattaacagcgcattagagctgcttaatgaggtcggaatcgaaggtttaacaacccgtaaactcgcccagaagcttggtgtagagcagcctacattgtattggcatgtaaaaaataagcgggccctactggatgcgctggcggtggagatcttggcgcgtcatcatgattattcactgcctgcggcgggggaatcctggcagtcatttctgcgcaataatgcaatgagtttccgccgcgcgctgctgcgttaccgtgacaccgcaaaaaagcacctcggcacgcgtcctgatgaaaaacagtatgatacggtggaaacccagttacgctttatgacagaaaacggcttttcactgcgcgacgggttatatgcgatttcagcggtcagtcattttaccttaggtgccgtactggagcagcaggagcatactgccgccctgaccgaccgccctgcagcaccggacgaaaacctgccgccgctattgcgggaagcgctgcagattatggacagtgatgatggtgagcaggcctttctgcatggcctggagagcctgatccgggggtttgaggtgcagcttacggcactgttgcaaatagtc

SEQ ID NO: 455 - DNA, 624 bp, Artificial
  Modified tetracycline repressor
atgtctagattagataaaagtaaagtgattaacagcgcattagagctgcttaatgaggtcggaatcgaaggtttaacaacccgtaaactcgcccagaagcttggtgtagagcagcctacattgtattggcatgtaaaaaataagcgggccctactggatgcgctggcggtggagatcttggcgcgtcatcatgattattcactgcctgcggcgggggaatcctggcagtcatttctgcgcaataatgcaatgagtttccgccgcgcgctgctgcgttaccgtgacaccgcaaaaccccacctcggcacgcgtcctgatgaaaaacagtatgatacggtggaaacccagttacgctttatgacagaaaacggcttttcactgcgcgacgggttatatgcgatttcagcggtcagtcattttaccttaggtgccgtactggagcagcaggagcatactgccgccctgaccgaccgccctgcagcaccggacgaaaacctgccgccgctattgcgggaagcgctgcagattatggacagtgatgatggtgagcaggcctttctgcatggcctggagagcctgatccgggggtttgaggtgcagcttacggcactgttgcaaatagtc

SEQ ID NO: 456 - DNA, 624 bp, Artificial
  Modified tetracycline repressor
atgtctagattagataaaagtaaagtgattaacagcgcattagagctgcttaatgaggtcggaatcgaaggtttaacaacccgtaaactcgcccagaagcttggtgtagagcagcctacattgtattggcatgtaaaaaataagcgggccctactggatgcgctggcggtggagatcttggcgcgtcatcatgattattcactgcctgcggcgggggaatcctggcagtcatttctgcgcaataatgcaatgagtttccgccgcgcgctgctgcgttaccgtgaccgtgcaaaatcgcacctcggcacgcgtcctgatgaaaaacagtatgatacggtggaaacccagttacgctttatgacagaaaacggcttttcactgcgcgacgggttatatgcgatttcagcggtcagtcattttaccttaggtgccgtactggagcagcaggagcatactgccgccctgaccgaccgccctgcagcaccggacgaaaacctgccgccgctattgcgggaagcgctgcagattatggacagtgatgatggtgagcaggcctttctgcatggcctggagagcctgatccgggggtttgaggtgcagcttacggcactgttgcaaatagtc

SEQ ID NO: 457 - DNA, 624 bp, Artificial
  Modified tetracycline repressor
atgtctagattagataaaagtaaagtgattaacagcgcattagagctgcttaatgaggtcggaatcgaaggtttaacaacccgtaaactcgcccagaagcttggtgtagagcagcctacattgtattggcatgtaaaaaataagcgggccctactggatgcgctggcggtggagatcttggcgcgtcatcatgattattcactgcctgcggcgggggaatcctggcagtcatttctgcgcaataatgcaatgagtttccgccgcgcgctgctgcgttaccgtgactccgcaaaaaagcacctcggcacgcgtcctgatgaaaaacagtatgatacggtggaaacccagttacgctttatgacagaaaacggcttttcactgcgcgacgggttatatgcgatttcagcggtcagtcattttaccttaggtgccgtactggagcagcaggagcatactgccgccctgaccgaccgccctgcagcaccggacgaaaacctgccgccgctattgcgggaagcgctgcagattatggacagtgatgatggtgagcaggcctttctgcatggcctggagagcctgatccgggggtttgaggtgcagcttacggcactgttgcaaatagtc

SEQ ID NO: 458 - DNA, 624 bp, Artificial
  Modified tetracycline repressor
atgtctagattagataaaagtaaagtgattaacagcgcattagagctgcttaatgaggtcggaatcgaaggtttaacaacccgtaaactcgcccagaagcttggtgtagagcagcctacattgtattggcatgtaaaaaataagcgggccctactggatgcgctggcggtggagatcttggcgcgtcatcatgattattcactgcctgcggcgggggaatcctggcagtcatttctgcgcaataatgcaatgagtttccgccgcgcgctgctgcgttaccgtgaccccgcaaaagtgcacctcggcacgcgtcctgatgaaaaacagtatgatacggtggaaacccagttacgctttatgacagaaaacggcttttcactgcgcgacgggttatatgcgatttcagcggtcagtcattttaccttaggtgccgtactggagcagcaggagcatactgccgccctgaccgaccgccctgcagcaccggacgaaaacctgccgccgctattgcgggaagcgctgcagattatggacagtgatgatggtgagcaggcctttctgcatggcctggagagcctgatccgggggtttgaggtgcagcttacggcactgttgcaaatagtc

SEQ ID NO: 459 - DNA, 66 bp, Artificial
  Description of Artificial Sequence: Primer
  Modified_base (10)..(57): The base represented in the sequence below represents the dominant nucleotide for that position (i.e. present 85-281304788n of the population); however, the other bases are also represented in equal portions of the remain 1535716720454f the population, (i.e. 5 3.881862e-312ach base).
ataatcatgatgacgcgccaagatctccaccgccagcgcatccagtagggcccgcttattttttac
